United States Patent Application Publication US 2026/0226493 A1, published August 6, 2026 (application 19/153,098).

The application's sequence listing, which the Patent Office published only in electronic form, follows.

SEQUENCE LISTING (488 sequences)

SEQ ID NO: 1 - protein, 833 aa, Arabidopsis thaliana
MIPVTATLIRHRLRHLRHRIRFKSTSVSPFHLPLNHPTYLIWSANTSLGKTLVSTGIAASFLLQQPSSSATKLLYLKPIQTGFPSDSDSRFVFSKLDSLSLRRQIPISISNSVLHSSLPAAKSLGLNVEVSESGMCSLNFRDEKTVTGAPELLCKTLYAWEAAISPHLAAERENATVEDSVVLQMIEKCLKEEMECGVKSEKSDLLCLVETAGGVASPGPSGTLQCDLYRPFRLPGILVGDGRLGGISGTIAAYESLKLRGYDIAAVVFEDHGLVNEVPLTSYLRNKVPVLVLPPVPKDPSDDLIEWFVESDGVFKALKETMVLANLERLERLNGMAKLAGEVFWWPFTQHKLVHQETVTVIDSRCGENFSIYKASDNSSLSQQFDACASWWTQGPDPTFQAELAREMGYTAARFGHVMFPENVYEPALKCAELLLDGVGKGWASRVYFSDNGSTAIEIALKMAFRKFCVDHNFCEATEEEKHIVVKVIALRGSYHGDTLGAMEAQAPSPYTGFLQQPWYTGRGLFLDPPTVFLSNGSWNISLPESFSEIAPEYGTFTSRDEIFDKSRDASTLARIYSAYLSKHLQEHSGVRQSAHVGALIIEPVIHGAGGMHMVDPLFQRVLVNECRNRKIPVIFDEVFTGFWRLGVETTTELLGCKPDIACFAKLLTGGMVPLAVTLATDAVFDSFSGDSKLKALLHGHSYSAHAMGCATAAKAIQWFKDPETNHNITSQGKTLRELWDEELVQQISSHSAVQRVVVIGTLFALELKADASNSGYASLYAKSLLIMLREDGIFTRPLGNVIYLMCGPCTSPEICRRLLTKLYKRLGEFNRT

SEQ ID NO: 2 - protein, 819 aa, Zea mays
MVRRLFLHHARRRLHSGTASSIPLSTPIFAIFGANTGVGKTLVSAGLATALLSSPSPAVSSVAYLKPLQTGYPVDSDASFVFSRTPALLRAFPPCRATRLIASCRTFFQSPAVEAKAESLHESQEKVVTYGAGAAEQTKVLACCTAYAWREPVSPHLAAEREGMAAGDDEVKGCVEQWLLEEGIGEGGEVWKILETAGGVASPSASGTLQCDLYRPFRLPAILVGDGRLGGISSTLSAYETLLLRGYDVSAVILEDRELSNDKFLLSYLRNRVHVLILPQIPEDPLDDLTDWFSESSSIFIFLKDELQSFHSRRIERLNSMQRKSKALLWWPFTQHNLVPQDSVTVIDSRYGENFSVYKIKDKMLIPQFDACASWWTQGPDSNLQIELARDMGYAAARYGHVMFPENVHEPALHSAEVLLGGVGKGWASRVYYSDNGSTAIEIALKMAFRKFSLDHGIMASSENSTRNERNIQLKVLALNGSYHGDTLGAMEAQAPSAYTSFLQQPWYSGRGLFLDPPTVYIKSEVYNISLPQSMQHDPQTYGFFSQAEVFCKTRDKTFAADLYSSYIKQKLSEFSLSSSSEHLAALIIEPVIQGAGGMLMIDPLFQRVLVSECRSRKIPVIFDEVFTGFWRLGVESASELLGCLPDIACYAKLMTGGIIPLAATLATEEVFESFESDSKLTALLHGHSYTAHAMGCTAALKAMQWYRGPSTNSNLDTDHMKLKELWDGTLVKQLSSLPNVKRVVSLGTLCAIELKAEGADAGYASLYASSLVQQLRKEDDIYIRPLGNVIYLMCGPCTPRDSCTRQLLKVHRRLCALN

SEQ ID NO: 3 - protein, 859 aa, Nannochloropsis gaditana
MCSLTIQVFGANTDVGKTVISAGLLRAASNRPLRRRTTYIKPLQTGKIHDGSFVQRYTSADVSCHTLYSWETPLSPHVAATKEGKTISSEELLGMLRTCLQQAQESHTVGGDGGGVRQREGSNVGDLVVVETAGGVLSPGPSPLQTQADLYRPLRLPVLLVGDGRLGGISSTLAAYESLYCRGYEVHAIAVLEVPHYIENAAAVSEYITGTLGHAETPVLSLPHLPEVSSVSFSTGDVDKDVLLGGLDQWYHQHEHVFHHLLDTLIDRERVRIQRLQKMTTQAAQVFWYPFTQHSGLSGTDLHVVDSAYGDNYTLISKSSEDGDAKERVPCSRTLIDACASWWTQGLGHGRVDVALAVGAAAGRFGHVIFPGNVHEPALRLAELMLAGPGQGWASRVFFSDNGSTAMEIAVKMALKKNSVDLKYEKGCSKEEFRVEQPNDKISATPLTVVTQRDCYHGDTLGCMDAAAPTIFNTGQHPWYQPRTLSLTVPTFGYVSGHLQVEIPPEITRAAGQSALQLPDSGQVLKFPGGLATLLDVHAREGSDAAVIYRKAIRAQFIAFERGEEGILSSNTVIPLRGEAGQGHRCRKLGAVLLEPVLMGAAGMVMVDPLFQRILTLEGRAYGLPVVFDEIASGLYRLGCASAAELLGVAPDIACYGKTLTGGYLPMALTLTTEAVFEAFHGTNKSDALLHGHSYTANPLGCAAAVHALKAYAVIHETNIRTSQECCQRKEDFFPNKNKCSSHHNICRYNEDQVAALSNLSGVRRAVALGTVLAVELTEVESSNRKGYSSTASTHIVNDLREAGIYARPLGNVVYLIASQVSSGGTFECLVDTLDRVLRRRGDTLGKFTHDMTTSGVVI

SEQ ID NO: 4 - protein, 811 aa, taxus chinensis
MASLALTRRRFNPVSRLSLHKCRSTFSRSGQAGEDRTPKQKLHIPSGFEVDLSHPTYVIWGSNTGVGKTLVSTGLAASLLNASQNLLYVKPVQTGFPQDSDSRYVSHKVKDILKQRKPSNNVHISHQVLKASPRAWELLPGSKGFGEVASYERAIQGMRNVCDYEGQTVQGLYKGLADLKLVCKTIYGWYEAVSPHLAAAGEKCSVDDCEVVENLQNSLREFNVDENNTNRWSIIETAGGVASPGPSGTLQCDLYRPFRLPSILVGDGRLGGISGTISAYETLCIRGYDICAVILADTGLSNEKCLSTYLHDRVPVFVLPKIPDDTNNTLLEWFSESYKVFSEIKDTLQTSYFKRIYRLHEMPMKARQILWWPFTQHSLVTEQSISLIDSRFGENFGVYKGKNHKDVKESIVQQFDACASWWTQGPSAILQTELAREVGYTTGRFGHVMYPENVYEPALHCAELLLEGVGKGWATRVFLSDNGSTAIEISLKMAFRKFAFDHGFLPEHFNEDLRKICPQFKVEIGTISYTTCAFFIEMTMEEFSEESYTGRGLFLDPPTVFLHNEEWQLHLPDALMYSDLKYPGLVIHASGGMHMIDPLFQRDLVKECRKRRIPVIFDEVFTGFWRLGAESAAEILGCAPDIACYAKLLTGGIVPLAATLATESIFEAFEGKSKLFALLHGHSYSGHAIGCAAAIKAIQWFKDAEMNLNICTDGSRLQELWDSKLVAKISALSSVKRVIALGTICALELQADESNTGYGSLLASSLVQKLRDDGVYMRPLGNVIYLMCGPATPPAMCSTLLQKLHKRLDEC

SEQ ID NO: 5 - protein, 928 aa, Physcomitrium patens
MHLLLLLPLRRRCTNPIAPRIAHQSRFLVSTAGACSPLPRHLLSGIWGRCLSSHPSPIEDADEARCVAENVADALDVSYPTYMVWGSNTGVGKTLVSAGLCSAILRLSKCQGNSGAKDLLYLKPVQTGFPSDSDARYVYQEVSRVGRLHPEAISEGLFLCNHTLQVSPAVQISARAGASVPVQPQSAWNAGGLSSSLNGTGMKDFCSYESQLLQGVKSRNIPADGDVYGRAQLRNTLSRFTCKTMWAWYEPISPHLAAAREGSTVPDTMVVEAIQRSLQALSSSRKTSGHREDAGDCAEKWAILETAGGVASPGPSGSLQCDMYRSLRFSGLLVGDGRLGGISTTIAAYESLRSRGYDIPAIVIVDSGLSNEEPVLQYLRHKIPVVVLPPLPEDPNKRLEEWFRLAEGTFLELMNVLENSHSKRLRRLEEMPKMAGEILWWPFTQHDLVAQDSITLIDSRSGENFSVYKSGTPSTGKTIATQFDACASWWTQGPDSILQPEIAREVAYTAGRYGHVMFPENVHEPALRCAEILLAGAGRGWAERVFFSDNGSTAIEVAIKMAFRKYIVDHGLSDPSTIERRGGQLKVVALKGSYHGDTLGAMEAQAPSAYTGFKQQPWHVGRGFFLEPPTVFQRQGRWHLQLPRVFHDSDSSDSASCWKSRDEIFDICRDSTPLANLYIRSINQQLAAAVREENNVPAALIIEPVMHGAGGMDMIDPLYQRMLVRECRRRGIPTIFDEVLSGCWRFGVESAVDLLGCSPDIACYSKLLSGGLVPLAATLATQAVFEAFRGISKLDALLHGHSYTAHAVGCASAVVSLQYFSDPSKNSNLLPGGRRLRELWKPELVSLISSHQSVERVVSVGTIFALELRANAAESGYASMLSKELVENLRQEGIYTRPLGNVVYLMCGPLTQPKTCTTMLEKLLALLG

SEQ ID NO: 6 - protein, 903 aa, Adiantum nelumboides
MAPPLSHLYPHLRIHQIFGANTDVGKTIFTTALALASAALPIGSKNGKIERDGQGSLNFQENGEAVHYIKPISTGPLRDSDSLHIARYLPSVNAHTLFQFNDPVSPHVAAARYKAEDKNKQDLDVSDEAVIHALSNKISTFTQAAIRPGAAYIETAGGVHSPAPSGSSISQLLRPLRMPTILIGDSNLGGISTTKSAYDSLLMAGYDIEALLLFSDAGRGWGNAEYLTKWGEEIGLPVWALTGPSSSTVWGLPPAREGSDEEDARRMQEYYAGLVAGRGDAAENDESSLGAAPIIEHLRRRHEKRLENIGSMAKRTRDTCWWPFTQHMLAKSDEDVNVIDSAYGDFFTVLNQSSENASKHGNTSLLRPLLDGSASWWTQCLGHADPGLTRAAARAAGRYGHVLFPMCANEPSLQLSETLVGKNSSDVIGTSPGEGWASRVFFSDDGSTGMEVALKMAISSASSRYAPKAESQLAKSKVQQGRSAGNQSGRPPREWMVLGLKGSYHGDTIGAMDACEGNIFNEKVEWYRGRGSWFEPPTVSIKDGQAMVDLPLQDADWQHLSGKVESKKNFNNVSDIYNVSDRMDNDELKNIYSKLIYGWLDHLTRMEGNRYGALILEPLIMGAGGMICVDPLFQRCFVDVIRANPDLFSQVDPPLRGTSHIRESDVPGSGDWKGLPIIFDEVFTGLYRLGYSTPAQAIGVSPDISVLAKILTGGMVPMSVTLASDSIFSTFSKSDQKIDALLHGHSYTAHPIGCEIANEALRRIETMQVENFWGDAKADWESRTSSLQRDNSMKNVPSPWSLWSREAVEAFSRSANVESSMALGTVMILHLSDSAGEKGYSSSAAVDILQHLRTTQDTGFNKHVSFNIHARPLGNVVYMMCSLNTPVNVLRETEAALKHVLKV

SEQ ID NO: 7 - protein, 825 aa, Setaria italica
MLPRLLLRSRHRRRYSSAAATVPLSTPTFAVFGANTGVGKTLVSAGLVAALLNSRSPSVSAVSYLKPLQTGYPADSDARFVFARAPALLRASSSPRATRLVASCRTLFPSPAVGPEAEPLHQSQEKVVTYGGDGAEEETKVLACRTVYAWREPVSPHLAAEREGMAAGDDEVRGCVDQWLMEEGVGEGGEVWKVLETAGGVASPSASGTLQCDLYRPFRLPAILVGDGRLGGISSTLSAYETLLLRGYDVSTVILEDRDLTNDTFLLSYLRNRVHVLALPQIPEDPSDDLTDWFSESSSVFNLLKDSLQSFHSKRVERLNGMQKKSKDLLWWPFTQHNLVPQDSVTVIDSRCGENFSAYKIKDNTMMLVPQFDACASWWTQGPDSDLQIELARDMGYAAARYGHVMFPENVHEPALRAAELLLGGVGKGWASRVYYSDNGSTAVEIALKMAFRKFSLDHGILADSEKSIRNERNIQLKVLALNGSYHGDTLGAMEAQAPSAYTSFIQQPWYSGRGLFLDPPTVCIKSETCNVSLPQSMQHYPRTSGDTCFPSLAEVFCKTRDTSSAADLYLSYIKQQLSEFSQSSNSDHLAALIIEPVIQGAGGMLMIDPLFQRVLVRECRSRKIPVIFDEVFTGFWRLGVESASELLGCLPDIACYAKLMTGGIVPLAATLATEEVFESFKSDSKLTALLHGHSYTAHAMGCMAALKAIQWYRDPSTNSNLDLDHMKLKELWDGALVKQLSSLPNVKRVVSLGTLCAIELKAEGSDAGYASLYASSLVQQLRREDDIYIRPLGNVIYLMCGPCTPRDSCSRQLHKVLRRLCDLN

SEQ ID NO: 8 - protein, 870 aa, Phoenix dactylifera
MPSCPLLPLLPRRRPPPSPLLLLLLSRSLHSSPPELDLSHPTLVVWGSNTGVGKTIVSAGLAASVLSPSSPNTATFLYLKPVQTGFPRDSDSRFVYRKVSDLFRHRLGGFSAQLLASNHALKASVPAAREVLGARTERPGEEGEEASTGLCCYEETRVGTGESTTGDFKLVCKTLYGWKEAISPHLAVEREGMAVEDSSLREVLGRLLNSSMGGGGDRRKENVWRVIETAGGVASPGPSGSIQCDLYRPFRLPAVLVGDGHLGGISTTLSAYESLTLRGYDVIAIILADHGLSNEIPLLSNLRHRVPVLVLPPVPEDPLNDLVDWFCESSKAFSSLQDLVQSTHSKRIQRLHDMPRKAGNILWWPFTQHKLVPEEIVTVIDSRCGENFAVHKVRNDREMIVRQFDACASWWTQGPDFALQIELARDMGYSAARYGHVMFPENVYEPALHCAELLLEGVGKGWASRTYYSDNGSTAIEIALKMAFRKFLLDNEMLMDSGNGISSERCIELRVLALNGSYHGDTLGAMEAQAPSSYTGFLQQPWYSGRGLFLDPPTIFIHKEIWNLSVPESFESDQLKPEDMRFSSSDALFCPSRDSSAIAGIYSAYISNQLLQFSKLSCSTQIGALIIEPVIQAAGGMHMIDPLFQRILVRECRNRRIPVVFDEVFTGFWRLGKESAAELLGCVPDVACFGKLMSGGIIPLAVTLTTEAVFEAFKGDSKLMALLHGHSYSAHAMGCTAAAKSIQWFRDPFTNPNVEFKEKKLKELWEMKLVLQISSLPAVQRVITLGTLCAVELKAEGSDAGYASLYASLLVQQLREDGLYVRPLGNVIYLMCGPCTSSHFCSQQLQQVYQRLHEFSQHQLRDSQSFQREG

SEQ ID NO: 9 - protein, 849 aa, Ostreococcus tauri ATCC 22665
MSAPIARRASSVARGRTRWLTSTSIERSREWFVRSLGSASDGAASGNGRALELSIASFAIWGANTGVGKTLASAGLARAATRRGTATTFLKPVQTGYPEDSDAGFVARQTKGNETAGEHAAVASGSTEGGGEGFAAGVTRAHTEFAWRRAAGPHLTAAEEGRPVSDEEIVRATRNYLREFAESAREGNARGFAVIETAGGVASPGPSGTLQCEILRALRLPAILIGDGRLGGISTTTSAYESLHARGYDVVGVLMADDGYANHEAVAKILPSGTKVFALPPLPPQGKADAWLEKSAGVFSEAFETAMNWHEKRIQALQKLPGEALEKIWWPFTQHATVEPDTVTVIDGRYGEDFEIYDQEKGRDGAIDLRFDGAASWWTQGVSAELQQELNSAAANAAGRYGHVMFPENVHQPSMDATNALLEGPGKGWGSRVFYSDNGSTATEVGLKMAFRKYYVDAGLVSKDGHQRAKDLINDGSCHLPQLRIIALDGSYHGDTLGAMDMQSPSVFTGPMQTPWYQPRGLFLQPPSLAIRNGEWTVALPPHGLLNDGEDRLFHDGKDLESNTTWKSKADAFDIGKRLDSPLANEYRQAVDKALERAEQDAKAGHMGPVGALMMEPVLHGAGGMVLIDPLFQNILMKVCRERKIPIVLDEVFAGIWRLGTEGAWEIIGEKPDISCYAKLLTGGLMPMSATVATADVFDVFYGPGKAQGLLHGHSYTAYPIGCAVASKALSLYKDPAKNPNLIVDASSKGDTPTAYLRELWDESKLKEISNKSSVRRVFGQGCVLAVELEVEGEGGYSSNAAKEVVLRLRPHSVQARPLGNVVYLMCAPTTPKATCDRLLNVLAEELSE

SEQ ID NO: 10 - protein, 852 aa, Helianthus annuus
MFHPPLLFTLSRHFLRRHHHRHLSTLSHTLSHPIYTIWSANTGLGKTLVSAGIAAASVASPPSKLVYIKPIQTGYPLDSDAAFVYRKIPQILHRRNPNLTLTASNQTLNVSIPAAKVKIGDNFSDSRNGFGEFGFCEEMKVGEGVGEGSELICKTIYAWNEAISPHLASEREGALVGDEEVLVLLKKCLEIGVGSEGQGSVLSLVETAGGVASPGSSGSLQCDLYRPFRLPSILVGDGKLGGISGTISAYESLTIRGYDVVAIVLEDHGLENEVPLLSYLRNRVPVLVLPSIPKDPLDNLMEWYDESQSVFDSLKGIMLSSYEKQMYRLHEMPKKAQEIFWWPFTQHKLVPQEKVTVIDSRCGENFAVHKVKDHDYITQMFDACASWWTQGPNAALQIKLAREMGYTAARYGHVMFPENVYEPALQCAELLLQGVGKGWASRVFFSDNGSTAIEIALKMAFRKFLADNKLLMDLPHYNTDESNIELKVVALNGSYHGDTLGAMDAQAPSPYTGFLQQPWYTGRGVFLDPPFVSMCDGVWKIAVPKKMHYEDVILEDTSFNSRDQVFNRSRDDSKLASIYSTYISQELLPSSGSTKCSYAGALIIEPVIQGAGGMLMVDPLFQRILVKECKNRKIPVIFDEVFTGYWRLGVESAAELLFCQPDIACFAKLMTGGMIPLAATLATNDVFESFVGDSKLNALLHGHSYSAHAVGCATACNSIKWFKDSQTNPNLVPGQNLLRELWDAELVRKISFHPAVQRVVSLGTLFALELKVEDNDAGYASLSGTSLLLKLREDGIYMRPLGNVIYMMCGPCTSHRVCLQMLEKLYMRLDEFKQEKIGTARDYDHDHRLPIA

SEQ ID NO: 11 - protein, 864 aa, Quercus robur
MYFLISLHRRGHRHLRHVKDLSTTAHSQLHVPLNHPTFLVWASNTSLGKTLVSTGLAASSLLNPTPKPRKFLYLKPIQTGFPSESDSSSVFHKLSRLSLLRRHNLPHFSLFSSNHILKASFPAANSALGQEISETPHSGMRDLGYYEEAKPEGDVGGGAASQLVCKTLYAWREAVSPHLAAERESGVVEDAAVLELLQKCLRFELEGGGEKGKETEIFCVVETAGGVASPGPSGSLQCDLYRPFRLPGILVGDGRLGGISGTISAYESLKLRGYDIAAVVFEDHGLVNEMPLLSYLRNRVPVLVLPSVPKDLSNDLMEWFDESRGVFDSLKEEMLSAYSKRMMRLQDMPKKAGEIFWWPFTQHQLVPEEAVTVIDSRHGENFAVFKAQNNEFITQQFDACASWWTQGPDTTLQTELARDMGYAAARFGHVMFPENVYEPALECAELLLEGVGKGWASRTFFSDNGSTAIEIALKMAFRKFSYDHGILSDGRKDNTASQRVKLMVLALQGSYHGDTLGAMEAQAPSSYTGFLQQPWYTGRGLFLDPPTVYMCNGVWKLSLPEGLHLEIPKLENKGFSSRDEIFHKIRDKSDLARIYSSYISEQLSQYSGSGGFYHIGALIMEPVILGAGGMHMIDPLFQRVLVNECRSKKIPVIFDEVFTGFWRLGRETAAELLGCVPDIACFAKLMTGGIIPLAATLATNAIFNSFIGESKLKALLHGHSYSGHAMGCTAAVKSIKWFKDPQTNLNITDEGRSLRELWDEDVVQQISSHPAVERVVALGTLFALELRAEGSNAGYASQYASSLLQNLRQDGIYTRPLGNVIYLMCGPCTSPEICSQLLVKLYKRLEDFDQFHQIREENSESYGG

SEQ ID NO: 12 - protein, 764 aa, Thraustotheca clavata
MLTLSMRMRPRTLMKMSFSTRAGLGQLGCLTSLDQSVPNAVPTSLHAPIVQVFGSNTDVGKTVIAAGLCRAALLSSKNATVGYIKPLQTGGDAMMDAEFLNRHAGNADNRLTSHTLFSWETAVSPHLAASLENKAVDDATVVAKLSKTLKQIQKEEKGSALTVVETAGGVCSPSASGKFQCDVYRPLRLPTVLVGDGCLGGISATMSALDSLLIRGYDVSCIVLIEQDNLSNGEAISERASELGIPIFSLDKLPPQPEPLDLWYENSTETFRSVHDTIASTHKARVARLQELPSIAKKALWWPFTQHKSNKGVLVIDSAYGDTFATYNQKNQAIEPMYDACASWWTQGVGHGNAKMALSLATAAGRYGHVMFPENAHEPAIALSEMLLKSVGKNWAGKVFFSDDGSTAVEIGIKMALRKYAVDHGLGMSFEGINDVLVLAQEGCYHGDTLGTMNIAEPSVYNKTQHPWYKPKALFVHPPSVKVASNGQMQVTWQNVNPTLVTHLPTLDDLFDISRDTSPLTQQYTEYVESLLDSVPSTTVVGALIVEPILIGAGGMVFVDPLFQRTMVRVCQQRKIPVIFDEVFSGFWRLGAESARDLLQVNPDIACYAKLLTGGAVPMSTTLATNEVFDAFYTDSKADALLHGHSFTANPVGCAAAVTALDMYKTIEKKNSTRVHWNVDQVAALAARPGIARAFQLGTVLVIELESTSRGYTDTTGQDVLVRLRNHGIYARSLGNVLYIMASPLSTPATCIKIFNTVVDNLFA

SEQ ID NO: 13 - protein, 788 aa, Schizosaccharomyces japonicus
MLAHILFGANTEVGKTIWSTALCYASHYLAHAPVEYIKPVGAGPVEEADYVHLAKFVPCKCTNIHQFEKAMSPHMSEGAMQTTDASIVSALRKHLQASSFKNTFVETAGGVSSPAPSGSLQCDLYRPLRLPVLLIGDSKLGGISTTIAAYEQLKVRGYDISAILMLRDPENAPQYENWKYFSEIWSKSYSCHDKENIKCFTIPSPPALSQDAEADFKAMQKYYSESASVGYDVLKHIEQVQKTRLARLDDMINQTEKHIWYPFTQHTLVNPKEIAVIDSAHGDMYTVFAPNAKRKSEEALADGSKKEGSVAVEENKYKELFDASASWWTQGLGHGDPYLAMSAAYAAGRYGHVLLPNCTNEPALGLAEDLLSTVGKGWANRVYYSDNGATGMEIALKMALKAARIQHQLSGKIEIIGLEGAYHGDTIGTMDACPPNVYNVEVDWYDGRGIWFDSPVVKVSNGEVSVQWEDKSFSFTALDDVYNVSSRVNSHLAKQYASFIGEKVRTAMQQGHQFGALVIEPLVVGAGGMLFVDPLFQRVLVDIAKGRLPESPWYTEAHENKKAGIPVVFDEVFIGLYRLGQLRSADILGVYPDVQVNAKLLTGGLVPLSVTLASEELFEYFLSDKKSDALLHGHSYTAHPVGCHVARQSLKRLDQLNRTAWTENKQRWLEFFGCQNVNGVLSSRNPNAWSVWDPEWVYEVSKLECVESIMALGSLASVVLKAGDHGYQSSAAGQYLSRLREFSTGAEEYGILARPLGNVVYFMTSQITPTHTVKEIQAKIIDVFSQPR

SEQ ID NO: 14 - protein, 765 aa, Gibberella zeae
MAPVPALLWRSLRTHQVYGANTDVGKTIFSTVLCNAASKKGDRTWFLKPVSTGAVDEADGCHIQRFASSTNHETLFQYDIPCSPHIAAKVSGKPIPSDEAVLAKIHDSVSRYASEGPGWLFLETAGGVHSPGPSGTPQADLYTPLRAPVILVGDSKLGGISQTISAYESLRMRGHDIESILLFQDMKYENYQYLKDYFSKQGGIPVDTVPEPPSRLPDIQQDTEQMREYYASQTSNVSHVLDHLDKRGKQRISRLESLSEKASKSIWYPFTQQKLVTADTISAIDSAHGDYFQVLNKTYENLLQPAFDGSASWWSQGLGHANSRLTLAAAYAAGRYGHVMFAEAIHEPALALAEMMLEGAQNSRFSRVFYSDNGSTGCEVAVKMALRAARLRYGWGPNDNLQILGLKGSYHGDTIGAMDCAEPCVYNEKIEWYEGKGYWFDYPTIQCVEGKWVVSAPNGMGQDQKLESISEVFNLESRLKTEQYRGYEEYIEKTLKKLQDQGRKFGALMMEPIILGAGGMIFVDPLFQRALVDVVRRSPHLFGTKDALPAQGPQWSGLPVIFDEVFTGLYRLGRFTAASFLGTEADISVNAKLLTGGLVPLCTTMASESIFDAFKSDDKSDALLHGHSYTAHAVGCQVAVESVSEMQSMEKNGEWEWAEKDWAEDETQAWSVWSRDFVTDMSHNPQVLGVWALGSVLAISLRDDDGVGYKSLAAKKIQSHLRQGTGSWNAHSRVLGNVFYVMASQKTSRQSIRELQGLLVDALSK

SEQ ID NO: 15 - protein, 833 aa, Synthetic construct
  source 1..833: note = Arabidopsis thaliana BioDA protein A507K
MIPVTATLIRHRLRHLRHRIRFKSTSVSPFHLPLNHPTYLIWSANTSLGKTLVSTGIAASFLLQQPSSSATKLLYLKPIQTGFPSDSDSRFVFSKLDSLSLRRQIPISISNSVLHSSLPAAKSLGLNVEVSESGMCSLNFRDEKTVTGAPELLCKTLYAWEAAISPHLAAERENATVEDSVVLQMIEKCLKEEMECGVKSEKSDLLCLVETAGGVASPGPSGTLQCDLYRPFRLPGILVGDGRLGGISGTIAAYESLKLRGYDIAAVVFEDHGLVNEVPLTSYLRNKVPVLVLPPVPKDPSDDLIEWFVESDGVFKALKETMVLANLERLERLNGMAKLAGEVFWWPFTQHKLVHQETVTVIDSRCGENFSIYKASDNSSLSQQFDACASWWTQGPDPTFQAELAREMGYTAARFGHVMFPENVYEPALKCAELLLDGVGKGWASRVYFSDNGSTAIEIALKMAFRKFCVDHNFCEATEEEKHIVVKVIALRGSYHGDTLGAMEAQKPSPYTGFLQQPWYTGRGLFLDPPTVFLSNGSWNISLPESFSEIAPEYGTFTSRDEIFDKSRDASTLARIYSAYLSKHLQEHSGVRQSAHVGALIIEPVIHGAGGMHMVDPLFQRVLVNECRNRKIPVIFDEVFTGFWRLGVETTTELLGCKPDIACFAKLLTGGMVPLAVTLATDAVFDSFSGDSKLKALLHGHSYSAHAMGCATAAKAIQWFKDPETNHNITSQGKTLRELWDEELVQQISSHSAVQRVVVIGTLFALELKADASNSGYASLYAKSLLIMLREDGIFTRPLGNVIYLMCGPCTSPEICRRLLTKLYKRLGEFNRT

SEQ ID NO: 16 - protein, 833 aa, Synthetic construct
  source 1..833: note = Arabidopsis thaliana BioDA protein A507S
MIPVTATLIRHRLRHLRHRIRFKSTSVSPFHLPLNHPTYLIWSANTSLGKTLVSTGIAASFLLQQPSSSATKLLYLKPIQTGFPSDSDSRFVFSKLDSLSLRRQIPISISNSVLHSSLPAAKSLGLNVEVSESGMCSLNFRDEKTVTGAPELLCKTLYAWEAAISPHLAAERENATVEDSVVLQMIEKCLKEEMECGVKSEKSDLLCLVETAGGVASPGPSGTLQCDLYRPFRLPGILVGDGRLGGISGTIAAYESLKLRGYDIAAVVFEDHGLVNEVPLTSYLRNKVPVLVLPPVPKDPSDDLIEWFVESDGVFKALKETMVLANLERLERLNGMAKLAGEVFWWPFTQHKLVHQETVTVIDSRCGENFSIYKASDNSSLSQQFDACASWWTQGPDPTFQAELAREMGYTAARFGHVMFPENVYEPALKCAELLLDGVGKGWASRVYFSDNGSTAIEIALKMAFRKFCVDHNFCEATEEEKHIVVKVIALRGSYHGDTLGAMEAQSPSPYTGFLQQPWYTGRGLFLDPPTVFLSNGSWNISLPESFSEIAPEYGTFTSRDEIFDKSRDASTLARIYSAYLSKHLQEHSGVRQSAHVGALIIEPVIHGAGGMHMVDPLFQRVLVNECRNRKIPVIFDEVFTGFWRLGVETTTELLGCKPDIACFAKLLTGGMVPLAVTLATDAVFDSFSGDSKLKALLHGHSYSAHAMGCATAAKAIQWFKDPETNHNITSQGKTLRELWDEELVQQISSHSAVQRVVVIGTLFALELKADASNSGYASLYAKSLLIMLREDGIFTRPLGNVIYLMCGPCTSPEICRRLLTKLYKRLGEFNRT

SEQ ID NO: 17 - protein, 833 aa, Synthetic construct
  source 1..833: note = Arabidopsis thaliana BioDA protein A609C
MIPVTATLIRHRLRHLRHRIRFKSTSVSPFHLPLNHPTYLIWSANTSLGKTLVSTGIAASFLLQQPSSSATKLLYLKPIQTGFPSDSDSRFVFSKLDSLSLRRQIPISISNSVLHSSLPAAKSLGLNVEVSESGMCSLNFRDEKTVTGAPELLCKTLYAWEAAISPHLAAERENATVEDSVVLQMIEKCLKEEMECGVKSEKSDLLCLVETAGGVASPGPSGTLQCDLYRPFRLPGILVGDGRLGGISGTIAAYESLKLRGYDIAAVVFEDHGLVNEVPLTSYLRNKVPVLVLPPVPKDPSDDLIEWFVESDGVFKALKETMVLANLERLERLNGMAKLAGEVFWWPFTQHKLVHQETVTVIDSRCGENFSIYKASDNSSLSQQFDACASWWTQGPDPTFQAELAREMGYTAARFGHVMFPENVYEPALKCAELLLDGVGKGWASRVYFSDNGSTAIEIALKMAFRKFCVDHNFCEATEEEKHIVVKVIALRGSYHGDTLGAMEAQAPSPYTGFLQQPWYTGRGLFLDPPTVFLSNGSWNISLPESFSEIAPEYGTFTSRDEIFDKSRDASTLARIYSAYLSKHLQEHSGVRQSAHVGALIIEPVIHGCGGMHMVDPLFQRVLVNECRNRKIPVIFDEVFTGFWRLGVETTTELLGCKPDIACFAKLLTGGMVPLAVTLATDAVFDSFSGDSKLKALLHGHSYSAHAMGCATAAKAIQWFKDPETNHNITSQGKTLRELWDEELVQQISSHSAVQRVVVIGTLFALELKADASNSGYASLYAKSLLIMLREDGIFTRPLGNVIYLMCGPCTSPEICRRLLTKLYKRLGEFNRT

SEQ ID NO: 18 - protein, 833 aa, Synthetic construct
  source 1..833: note = Arabidopsis thaliana BioDA protein A609F
MIPVTATLIRHRLRHLRHRIRFKSTSVSPFHLPLNHPTYLIWSANTSLGKTLVSTGIAASFLLQQPSSSATKLLYLKPIQTGFPSDSDSRFVFSKLDSLSLRRQIPISISNSVLHSSLPAAKSLGLNVEVSESGMCSLNFRDEKTVTGAPELLCKTLYAWEAAISPHLAAERENATVEDSVVLQMIEKCLKEEMECGVKSEKSDLLCLVETAGGVASPGPSGTLQCDLYRPFRLPGILVGDGRLGGISGTIAAYESLKLRGYDIAAVVFEDHGLVNEVPLTSYLRNKVPVLVLPPVPKDPSDDLIEWFVESDGVFKALKETMVLANLERLERLNGMAKLAGEVFWWPFTQHKLVHQETVTVIDSRCGENFSIYKASDNSSLSQQFDACASWWTQGPDPTFQAELAREMGYTAARFGHVMFPENVYEPALKCAELLLDGVGKGWASRVYFSDNGSTAIEIALKMAFRKFCVDHNFCEATEEEKHIVVKVIALRGSYHGDTLGAMEAQAPSPYTGFLQQPWYTGRGLFLDPPTVFLSNGSWNISLPESFSEIAPEYGTFTSRDEIFDKSRDASTLARIYSAYLSKHLQEHSGVRQSAHVGALIIEPVIHGFGGMHMVDPLFQRVLVNECRNRKIPVIFDEVFTGFWRLGVETTTELLGCKPDIACFAKLLTGGMVPLAVTLATDAVFDSFSGDSKLKALLHGHSYSAHAMGCATAAKAIQWFKDPETNHNITSQGKTLRELWDEELVQQISSHSAVQRVVVIGTLFALELKADASNSGYASLYAKSLLIMLREDGIFTRPLGNVIYLMCGPCTSPEICRRLLTKLYKRLGEFNRT

SEQ ID NO: 19 - protein, 833 aa, Synthetic construct
  source 1..833: note = Arabidopsis thaliana BioDA protein A609H
MIPVTATLIRHRLRHLRHRIRFKSTSVSPFHLPLNHPTYLIWSANTSLGKTLVSTGIAASFLLQQPSSSATKLLYLKPIQTGFPSDSDSRFVFSKLDSLSLRRQIPISISNSVLHSSLPAAKSLGLNVEVSESGMCSLNFRDEKTVTGAPELLCKTLYAWEAAISPHLAAERENATVEDSVVLQMIEKCLKEEMECGVKSEKSDLLCLVETAGGVASPGPSGTLQCDLYRPFRLPGILVGDGRLGGISGTIAAYESLKLRGYDIAAVVFEDHGLVNEVPLTSYLRNKVPVLVLPPVPKDPSDDLIEWFVESDGVFKALKETMVLANLERLERLNGMAKLAGEVFWWPFTQHKLVHQETVTVIDSRCGENFSIYKASDNSSLSQQFDACASWWTQGPDPTFQAELAREMGYTAARFGHVMFPENVYEPALKCAELLLDGVGKGWASRVYFSDNGSTAIEIALKMAFRKFCVDHNFCEATEEEKHIVVKVIALRGSYHGDTLGAMEAQAPSPYTGFLQQPWYTGRGLFLDPPTVFLSNGSWNISLPESFSEIAPEYGTFTSRDEIFDKSRDASTLARIYSAYLSKHLQEHSGVRQSAHVGALIIEPVIHGHGGMHMVDPLFQRVLVNECRNRKIPVIFDEVFTGFWRLGVETTTELLGCKPDIACFAKLLTGGMVPLAVTLATDAVFDSFSGDSKLKALLHGHSYSAHAMGCATAAKAIQWFKDPETNHNITSQGKTLRELWDEELVQQISSHSAVQRVVVIGTLFALELKADASNSGYASLYAKSLLIMLREDGIFTRPLGNVIYLMCGPCTSPEICRRLLTKLYKRLGEFNRT

SEQ ID NO: 20 - protein, 833 aa, Synthetic construct
  source 1..833: note = Arabidopsis thaliana BioDA protein A609I
MIPVTATLIRHRLRHLRHRIRFKSTSVSPFHLPLNHPTYLIWSANTSLGKTLVSTGIAASFLLQQPSSSATKLLYLKPIQTGFPSDSDSRFVFSKLDSLSLRRQIPISISNSVLHSSLPAAKSLGLNVEVSESGMCSLNFRDEKTVTGAPELLCKTLYAWEAAISPHLAAERENATVEDSVVLQMIEKCLKEEMECGVKSEKSDLLCLVETAGGVASPGPSGTLQCDLYRPFRLPGILVGDGRLGGISGTIAAYESLKLRGYDIAAVVFEDHGLVNEVPLTSYLRNKVPVLVLPPVPKDPSDDLIEWFVESDGVFKALKETMVLANLERLERLNGMAKLAGEVFWWPFTQHKLVHQETVTVIDSRCGENFSIYKASDNSSLSQQFDACASWWTQGPDPTFQAELAREMGYTAARFGHVMFPENVYEPALKCAELLLDGVGKGWASRVYFSDNGSTAIEIALKMAFRKFCVDHNFCEATEEEKHIVVKVIALRGSYHGDTLGAMEAQAPSPYTGFLQQPWYTGRGLFLDPPTVFLSNGSWNISLPESFSEIAPEYGTFTSRDEIFDKSRDASTLARIYSAYLSKHLQEHSGVRQSAHVGALIIEPVIHGIGGMHMVDPLFQRVLVNECRNRKIPVIFDEVFTGFWRLGVETTTELLGCKPDIACFAKLLTGGMVPLAVTLATDAVFDSFSGDSKLKALLHGHSYSAHAMGCATAAKAIQWFKDPETNHNITSQGKTLRELWDEELVQQISSHSAVQRVVVIGTLFALELKADASNSGYASLYAKSLLIMLREDGIFTRPLGNVIYLMCGPCTSPEICRRLLTKLYKRLGEFNRT

SEQ ID NO: 21 - protein, 833 aa, Synthetic construct
  source 1..833: note = Arabidopsis thaliana BioDA protein A609M
MIPVTATLIRHRLRHLRHRIRFKSTSVSPFHLPLNHPTYLIWSANTSLGKTLVSTGIAASFLLQQPSSSATKLLYLKPIQTGFPSDSDSRFVFSKLDSLSLRRQIPISISNSVLHSSLPAAKSLGLNVEVSESGMCSLNFRDEKTVTGAPELLCKTLYAWEAAISPHLAAERENATVEDSVVLQMIEKCLKEEMECGVKSEKSDLLCLVETAGGVASPGPSGTLQCDLYRPFRLPGILVGDGRLGGISGTIAAYESLKLRGYDIAAVVFEDHGLVNEVPLTSYLRNKVPVLVLPPVPKDPSDDLIEWFVESDGVFKALKETMVLANLERLERLNGMAKLAGEVFWWPFTQHKLVHQETVTVIDSRCGENFSIYKASDNSSLSQQFDACASWWTQGPDPTFQAELAREMGYTAARFGHVMFPENVYEPALKCAELLLDGVGKGWASRVYFSDNGSTAIEIALKMAFRKFCVDHNFCEATEEEKHIVVKVIALRGSYHGDTLGAMEAQAPSPYTGFLQQPWYTGRGLFLDPPTVFLSNGSWNISLPESFSEIAPEYGTFTSRDEIFDKSRDASTLARIYSAYLSKHLQEHSGVRQSAHVGALIIEPVIHGMGGMHMVDPLFQRVLVNECRNRKIPVIFDEVFTGFWRLGVETTTELLGCKPDIACFAKLLTGGMVPLAVTLATDAVFDSFSGDSKLKALLHGHSYSAHAMGCATAAKAIQWFKDPETNHNITSQGKTLRELWDEELVQQISSHSAVQRVVVIGTLFALELKADASNSGYASLYAKSLLIMLREDGIFTRPLGNVIYLMCGPCTSPEICRRLLTKLYKRLGEFNRT

SEQ ID NO: 22 - protein, 833 aa, Synthetic construct
  source 1..833: note = Arabidopsis thaliana BioDA protein A609N
MIPVTATLIRHRLRHLRHRIRFKSTSVSPFHLPLNHPTYLIWSANTSLGKTLVSTGIAASFLLQQPSSSATKLLYLKPIQTGFPSDSDSRFVFSKLDSLSLRRQIPISISNSVLHSSLPAAKSLGLNVEVSESGMCSLNFRDEKTVTGAPELLCKTLYAWEAAISPHLAAERENATVEDSVVLQMIEKCLKEEMECGVKSEKSDLLCLVETAGGVASPGPSGTLQCDLYRPFRLPGILVGDGRLGGISGTIAAYESLKLRGYDIAAVVFEDHGLVNEVPLTSYLRNKVPVLVLPPVPKDPSDDLIEWFVESDGVFKALKETMVLANLERLERLNGMAKLAGEVFWWPFTQHKLVHQETVTVIDSRCGENFSIYKASDNSSLSQQFDACASWWTQGPDPTFQAELAREMGYTAARFGHVMFPENVYEPALKCAELLLDGVGKGWASRVYFSDNGSTAIEIALKMAFRKFCVDHNFCEATEEEKHIVVKVIALRGSYHGDTLGAMEAQAPSPYTGFLQQPWYTGRGLFLDPPTVFLSNGSWNISLPESFSEIAPEYGTFTSRDEIFDKSRDASTLARIYSAYLSKHLQEHSGVRQSAHVGALIIEPVIHGNGGMHMVDPLFQRVLVNECRNRKIPVIFDEVFTGFWRLGVETTTELLGCKPDIACFAKLLTGGMVPLAVTLATDAVFDSFSGDSKLKALLHGHSYSAHAMGCATAAKAIQWFKDPETNHNITSQGKTLRELWDEELVQQISSHSAVQRVVVIGTLFALELKADASNSGYASLYAKSLLIMLREDGIFTRPLGNVIYLMCGPCTSPEICRRLLTKLYKRLGEFNRT

SEQ ID NO: 23 - protein, 833 aa, Synthetic construct
  source 1..833: note = Arabidopsis thaliana BioDA protein A609T
MIPVTATLIRHRLRHLRHRIRFKSTSVSPFHLPLNHPTYLIWSANTSLGKTLVSTGIAASFLLQQPSSSATKLLYLKPIQTGFPSDSDSRFVFSKLDSLSLRRQIPISISNSVLHSSLPAAKSLGLNVEVSESGMCSLNFRDEKTVTGAPELLCKTLYAWEAAISPHLAAERENATVEDSVVLQMIEKCLKEEMECGVKSEKSDLLCLVETAGGVASPGPSGTLQCDLYRPFRLPGILVGDGRLGGISGTIAAYESLKLRGYDIAAVVFEDHGLVNEVPLTSYLRNKVPVLVLPPVPKDPSDDLIEWFVESDGVFKALKETMVLANLERLERLNGMAKLAGEVFWWPFTQHKLVHQETVTVIDSRCGENFSIYKASDNSSLSQQFDACASWWTQGPDPTFQAELAREMGYTAARFGHVMFPENVYEPALKCAELLLDGVGKGWASRVYFSDNGSTAIEIALKMAFRKFCVDHNFCEATEEEKHIVVKVIALRGSYHGDTLGAMEAQAPSPYTGFLQQPWYTGRGLFLDPPTVFLSNGSWNISLPESFSEIAPEYGTFTSRDEIFDKSRDASTLARIYSAYLSKHLQEHSGVRQSAHVGALIIEPVIHGTGGMHMVDPLFQRVLVNECRNRKIPVIFDEVFTGFWRLGVETTTELLGCKPDIACFAKLLTGGMVPLAVTLATDAVFDSFSGDSKLKALLHGHSYSAHAMGCATAAKAIQWFKDPETNHNITSQGKTLRELWDEELVQQISSHSAVQRVVVIGTLFALELKADASNSGYASLYAKSLLIMLREDGIFTRPLGNVIYLMCGPCTSPEICRRLLTKLYKRLGEFNRT

SEQ ID NO: 24 - protein, 833 aa, Synthetic construct
  source 1..833: note = Arabidopsis thaliana BioDA protein A609V
MIPVTATLIRHRLRHLRHRIRFKSTSVSPFHLPLNHPTYLIWSANTSLGKTLVSTGIAASFLLQQPSSSATKLLYLKPIQTGFPSDSDSRFVFSKLDSLSLRRQIPISISNSVLHSSLPAAKSLGLNVEVSESGMCSLNFRDEKTVTGAPELLCKTLYAWEAAISPHLAAERENATVEDSVVLQMIEKCLKEEMECGVKSEKSDLLCLVETAGGVASPGPSGTLQCDLYRPFRLPGILVGDGRLGGISGTIAAYESLKLRGYDIAAVVFEDHGLVNEVPLTSYLRNKVPVLVLPPVPKDPSDDLIEWFVESDGVFKALKETMVLANLERLERLNGMAKLAGEVFWWPFTQHKLVHQETVTVIDSRCGENFSIYKASDNSSLSQQFDACASWWTQGPDPTFQAELAREMGYTAARFGHVMFPENVYEPALKCAELLLDGVGKGWASRVYFSDNGSTAIEIALKMAFRKFCVDHNFCEATEEEKHIVVKVIALRGSYHGDTLGAMEAQAPSPYTGFLQQPWYTGRGLFLDPPTVFLSNGSWNISLPESFSEIAPEYGTFTSRDEIFDKSRDASTLARIYSAYLSKHLQEHSGVRQSAHVGALIIEPVIHGVGGMHMVDPLFQRVLVNECRNRKIPVIFDEVFTGFWRLGVETTTELLGCKPDIACFAKLLTGGMVPLAVTLATDAVFDSFSGDSKLKALLHGHSYSAHAMGCATAAKAIQWFKDPETNHNITSQGKTLRELWDEELVQQISSHSAVQRVVVIGTLFALELKADASNSGYASLYAKSLLIMLREDGIFTRPLGNVIYLMCGPCTSPEICRRLLTKLYKRLGEFNRT

SEQ ID NO: 25 - protein, 833 aa, Synthetic construct
  source 1..833: note = Arabidopsis thaliana BioDA protein A609W
MIPVTATLIRHRLRHLRHRIRFKSTSVSPFHLPLNHPTYLIWSANTSLGKTLVSTGIAASFLLQQPSSSATKLLYLKPIQTGFPSDSDSRFVFSKLDSLSLRRQIPISISNSVLHSSLPAAKSLGLNVEVSESGMCSLNFRDEKTVTGAPELLCKTLYAWEAAISPHLAAERENATVEDSVVLQMIEKCLKEEMECGVKSEKSDLLCLVETAGGVASPGPSGTLQCDLYRPFRLPGILVGDGRLGGISGTIAAYESLKLRGYDIAAVVFEDHGLVNEVPLTSYLRNKVPVLVLPPVPKDPSDDLIEWFVESDGVFKALKETMVLANLERLERLNGMAKLAGEVFWWPFTQHKLVHQETVTVIDSRCGENFSIYKASDNSSLSQQFDACASWWTQGPDPTFQAELAREMGYTAARFGHVMFPENVYEPALKCAELLLDGVGKGWASRVYFSDNGSTAIEIALKMAFRKFCVDHNFCEATEEEKHIVVKVIALRGSYHGDTLGAMEAQAPSPYTGFLQQPWYTGRGLFLDPPTVFLSNGSWNISLPESFSEIAPEYGTFTSRDEIFDKSRDASTLARIYSAYLSKHLQEHSGVRQSAHVGALIIEPVIHGWGGMHMVDPLFQRVLVNECRNRKIPVIFDEVFTGFWRLGVETTTELLGCKPDIACFAKLLTGGMVPLAVTLATDAVFDSFSGDSKLKALLHGHSYSAHAMGCATAAKAIQWFKDPETNHNITSQGKTLRELWDEELVQQISSHSAVQRVVVIGTLFALELKADASNSGYASLYAKSLLIMLREDGIFTRPLGNVIYLMCGPCTSPEICRRLLTKLYKRLGEFNRT

SEQ ID NO: 26 - protein, 833 aa, Synthetic construct
  source 1..833: note = Arabidopsis thaliana BioDA protein C388D
MIPVTATLIRHRLRHLRHRIRFKSTSVSPFHLPLNHPTYLIWSANTSLGKTLVSTGIAASFLLQQPSSSATKLLYLKPIQTGFPSDSDSRFVFSKLDSLSLRRQIPISISNSVLHSSLPAAKSLGLNVEVSESGMCSLNFRDEKTVTGAPELLCKTLYAWEAAISPHLAAERENATVEDSVVLQMIEKCLKEEMECGVKSEKSDLLCLVETAGGVASPGPSGTLQCDLYRPFRLPGILVGDGRLGGISGTIAAYESLKLRGYDIAAVVFEDHGLVNEVPLTSYLRNKVPVLVLPPVPKDPSDDLIEWFVESDGVFKALKETMVLANLERLERLNGMAKLAGEVFWWPFTQHKLVHQETVTVIDSRCGENFSIYKASDNSSLSQQFDADASWWTQGPDPTFQAELAREMGYTAARFGHVMFPENVYEPALKCAELLLDGVGKGWASRVYFSDNGSTAIEIALKMAFRKFCVDHNFCEATEEEKHIVVKVIALRGSYHGDTLGAMEAQAPSPYTGFLQQPWYTGRGLFLDPPTVFLSNGSWNISLPESFSEIAPEYGTFTSRDEIFDKSRDASTLARIYSAYLSKHLQEHSGVRQSAHVGALIIEPVIHGAGGMHMVDPLFQRVLVNECRNRKIPVIFDEVFTGFWRLGVETTTELLGCKPDIACFAKLLTGGMVPLAVTLATDAVFDSFSGDSKLKALLHGHSYSAHAMGCATAAKAIQWFKDPETNHNITSQGKTLRELWDEELVQQISSHSAVQRVVVIGTLFALELKADASNSGYASLYAKSLLIMLREDGIFTRPLGNVIYLMCGPCTSPEICRRLLTKLYKRLGEFNRT

SEQ ID NO: 27 - protein, 833 aa, Synthetic construct
  source 1..833: note = Arabidopsis thaliana BioDA protein C388T
MIPVTATLIRHRLRHLRHRIRFKSTSVSPFHLPLNHPTYLIWSANTSLGKTLVSTGIAASFLLQQPSSSATKLLYLKPIQTGFPSDSDSRFVFSKLDSLSLRRQIPISISNSVLHSSLPAAKSLGLNVEVSESGMCSLNFRDEKTVTGAPELLCKTLYAWEAAISPHLAAERENATVEDSVVLQMIEKCLKEEMECGVKSEKSDLLCLVETAGGVASPGPSGTLQCDLYRPFRLPGILVGDGRLGGISGTIAAYESLKLRGYDIAAVVFEDHGLVNEVPLTSYLRNKVPVLVLPPVPKDPSDDLIEWFVESDGVFKALKETMVLANLERLERLNGMAKLAGEVFWWPFTQHKLVHQETVTVIDSRCGENFSIYKASDNSSLSQQFDATASWWTQGPDPTFQAELAREMGYTAARFGHVMFPENVYEPALKCAELLLDGVGKGWASRVYFSDNGSTAIEIALKMAFRKFCVDHNFCEATEEEKHIVVKVIALRGSYHGDTLGAMEAQAPSPYTGFLQQPWYTGRGLFLDPPTVFLSNGSWNISLPESFSEIAPEYGTFTSRDEIFDKSRDASTLARIYSAYLSKHLQEHSGVRQSAHVGALIIEPVIHGAGGMHMVDPLFQRVLVNECRNRKIPVIFDEVFTGFWRLGVETTTELLGCKPDIACFAKLLTGGMVPLAVTLATDAVFDSFSGDSKLKALLHGHSYSAHAMGCATAAKAIQWFKDPETNHNITSQGKTLRELWDEELVQQISSHSAVQRVVVIGTLFALELKADASNSGYASLYAKSLLIMLREDGIFTRPLGNVIYLMCGPCTSPEICRRLLTKLYKRLGEFNRT

SEQ ID NO: 28 - protein, 833 aa, Synthetic construct
  source 1..833: note = Arabidopsis thaliana BioDA protein F348C
MIPVTATLIRHRLRHLRHRIRFKSTSVSPFHLPLNHPTYLIWSANTSLGKTLVSTGIAASFLLQQPSSSATKLLYLKPIQTGFPSDSDSRFVFSKLDSLSLRRQIPISISNSVLHSSLPAAKSLGLNVEVSESGMCSLNFRDEKTVTGAPELLCKTLYAWEAAISPHLAAERENATVEDSVVLQMIEKCLKEEMECGVKSEKSDLLCLVETAGGVASPGPSGTLQCDLYRPFRLPGILVGDGRLGGISGTIAAYESLKLRGYDIAAVVFEDHGLVNEVPLTSYLRNKVPVLVLPPVPKDPSDDLIEWFVESDGVFKALKETMVLANLERLERLNGMAKLAGEVFWWPCTQHKLVHQETVTVIDSRCGENFSIYKASDNSSLSQQFDACASWWTQGPDPTFQAELAREMGYTAARFGHVMFPENVYEPALKCAELLLDGVGKGWASRVYFSDNGSTAIEIALKMAFRKFCVDHNFCEATEEEKHIVVKVIALRGSYHGDTLGAMEAQAPSPYTGFLQQPWYTGRGLFLDPPTVFLSNGSWNISLPESFSEIAPEYGTFTSRDEIFDKSRDASTLARIYSAYLSKHLQEHSGVRQSAHVGALIIEPVIHGAGGMHMVDPLFQRVLVNECRNRKIPVIFDEVFTGFWRLGVETTTELLGCKPDIACFAKLLTGGMVPLAVTLATDAVFDSFSGDSKLKALLHGHSYSAHAMGCATAAKAIQWFKDPETNHNITSQGKTLRELWDEELVQQISSHSAVQRVVVIGTLFALELKADASNSGYASLYAKSLLIMLREDGIFTRPLGNVIYLMCGPCTSPEICRRLLTKLYKRLGEFNRT

SEQ ID NO: 29 - protein, 833 aa, Synthetic construct
  source 1..833: note = Arabidopsis thaliana BioDA protein F348D
MIPVTATLIRHRLRHLRHRIRFKSTSVSPFHLPLNHPTYLIWSANTSLGKTLVSTGIAASFLLQQPSSSATKLLYLKPIQTGFPSDSDSRFVFSKLDSLSLRRQIPISISNSVLHSSLPAAKSLGLNVEVSESGMCSLNFRDEKTVTGAPELLCKTLYAWEAAISPHLAAERENATVEDSVVLQMIEKCLKEEMECGVKSEKSDLLCLVETAGGVASPGPSGTLQCDLYRPFRLPGILVGDGRLGGISGTIAAYESLKLRGYDIAAVVFEDHGLVNEVPLTSYLRNKVPVLVLPPVPKDPSDDLIEWFVESDGVFKALKETMVLANLERLERLNGMAKLAGEVFWWPDTQHKLVHQETVTVIDSRCGENFSIYKASDNSSLSQQFDACASWWTQGPDPTFQAELAREMGYTAARFGHVMFPENVYEPALKCAELLLDGVGKGWASRVYFSDNGSTAIEIALKMAFRKFCVDHNFCEATEEEKHIVVKVIALRGSYHGDTLGAMEAQAPSPYTGFLQQPWYTGRGLFLDPPTVFLSNGSWNISLPESFSEIAPEYGTFTSRDEIFDKSRDASTLARIYSAYLSKHLQEHSGVRQSAHVGALIIEPVIHGAGGMHMVDPLFQRVLVNECRNRKIPVIFDEVFTGFWRLGVETTTELLGCKPDIACFAKLLTGGMVPLAVTLATDAVFDSFSGDSKLKALLHGHSYSAHAMGCATAAKAIQWFKDPETNHNITSQGKTLRELWDEELVQQISSHSAVQRVVVIGTLFALELKADASNSGYASLYAKSLLIMLREDGIFTRPLGNVIYLMCGPCTSPEICRRLLTKLYKRLGEFNRT

SEQ ID NO: 30 - protein, 833 aa, Synthetic construct
  source 1..833: note = Arabidopsis thaliana BioDA protein F348N
MIPVTATLIRHRLRHLRHRIRFKSTSVSPFHLPLNHPTYLIWSANTSLGKTLVSTGIAASFLLQQPSSSATKLLYLKPIQTGFPSDSDSRFVFSKLDSLSLRRQIPISISNSVLHSSLPAAKSLGLNVEVSESGMCSLNFRDEKTVTGAPELLCKTLYAWEAAISPHLAAERENATVEDSVVLQMIEKCLKEEMECGVKSEKSDLLCLVETAGGVASPGPSGTLQCDLYRPFRLPGILVGDGRLGGISGTIAAYESLKLRGYDIAAVVFEDHGLVNEVPLTSYLRNKVPVLVLPPVPKDPSDDLIEWFVESDGVFKALKETMVLANLERLERLNGMAKLAGEVFWWPNTQHKLVHQETVTVIDSRCGENFSIYKASDNSSLSQQFDACASWWTQGPDPTFQAELAREMGYTAARFGHVMFPENVYEPALKCAELLLDGVGKGWASRVYFSDNGSTAIEIALKMAFRKFCVDHNFCEATEEEKHIVVKVIALRGSYHGDTLGAMEAQAPSPYTGFLQQPWYTGRGLFLDPPTVFLSNGSWNISLPESFSEIAPEYGTFTSRDEIFDKSRDASTLARIYSAYLSKHLQEHSGVRQSAHVGALIIEPVIHGAGGMHMVDPLFQRVLVNECRNRKIPVIFDEVFTGFWRLGVETTTELLGCKPDIACFAKLLTGGMVPLAVTLATDAVFDSFSGDSKLKALLHGHSYSAHAMGCATAAKAIQWFKDPETNHNITSQGKTLRELWDEELVQQISSHSAVQRVVVIGTLFALELKADASNSGYASLYAKSLLIMLREDGIFTRPLGNVIYLMCGPCTSPEICRRLLTKLYKRLGEFNRT

SEQ ID NO: 31 - protein, 833 aa, Synthetic construct
  source 1..833: note = Arabidopsis thaliana BioDA protein F348S
MIPVTATLIRHRLRHLRHRIRFKSTSVSPFHLPLNHPTYLIWSANTSLGKTLVSTGIAASFLLQQPSSSATKLLYLKPIQTGFPSDSDSRFVFSKLDSLSLRRQIPISISNSVLHSSLPAAKSLGLNVEVSESGMCSLNFRDEKTVTGAPELLCKTLYAWEAAISPHLAAERENATVEDSVVLQMIEKCLKEEMECGVKSEKSDLLCLVETAGGVASPGPSGTLQCDLYRPFRLPGILVGDGRLGGISGTIAAYESLKLRGYDIAAVVFEDHGLVNEVPLTSYLRNKVPVLVLPPVPKDPSDDLIEWFVESDGVFKALKETMVLANLERLERLNGMAKLAGEVFWWPSTQHKLVHQETVTVIDSRCGENFSIYKASDNSSLSQQFDACASWWTQGPDPTFQAELAREMGYTAARFGHVMFPENVYEPALKCAELLLDGVGKGWASRVYFSDNGSTAIEIALKMAFRKFCVDHNFCEATEEEKHIVVKVIALRGSYHGDTLGAMEAQAPSPYTGFLQQPWYTGRGLFLDPPTVFLSNGSWNISLPESFSEIAPEYGTFTSRDEIFDKSRDASTLARIYSAYLSKHLQEHSGVRQSAHVGALIIEPVIHGAGGMHMVDPLFQRVLVNECRNRKIPVIFDEVFTGFWRLGVETTTELLGCKPDIACFAKLLTGGMVPLAVTLATDAVFDSFSGDSKLKALLHGHSYSAHAMGCATAAKAIQWFKDPETNHNITSQGKTLRELWDEELVQQISSHSAVQRVVVIGTLFALELKADASNSGYASLYAKSLLIMLREDGIFTRPLGNVIYLMCGPCTSPEICRRLLTKLYKRLGEFNRT

SEQ ID NO: 32 - protein, 833 aa, Synthetic construct
  source 1..833: note = Arabidopsis thaliana BioDA protein F348T
MIPVTATLIRHRLRHLRHRIRFKSTSVSPFHLPLNHPTYLIWSANTSLGKTLVSTGIAASFLLQQPSSSATKLLYLKPIQTGFPSDSDSRFVFSKLDSLSLRRQIPISISNSVLHSSLPAAKSLGLNVEVSESGMCSLNFRDEKTVTGAPELLCKTLYAWEAAISPHLAAERENATVEDSVVLQMIEKCLKEEMECGVKSEKSDLLCLVETAGGVASPGPSGTLQCDLYRPFRLPGILVGDGRLGGISGTIAAYESLKLRGYDIAAVVFEDHGLVNEVPLTSYLRNKVPVLVLPPVPKDPSDDLIEWFVESDGVFKALKETMVLANLERLERLNGMAKLAGEVFWWPTTQHKLVHQETVTVIDSRCGENFSIYKASDNSSLSQQFDACASWWTQGPDPTFQAELAREMGYTAARFGHVMFPENVYEPALKCAELLLDGVGKGWASRVYFSDNGSTAIEIALKMAFRKFCVDHNFCEATEEEKHIVVKVIALRGSYHGDTLGAMEAQAPSPYTGFLQQPWYTGRGLFLDPPTVFLSNGSWNISLPESFSEIAPEYGTFTSRDEIFDKSRDASTLARIYSAYLSKHLQEHSGVRQSAHVGALIIEPVIHGAGGMHMVDPLFQRVLVNECRNRKIPVIFDEVFTGFWRLGVETTTELLGCKPDIACFAKLLTGGMVPLAVTLATDAVFDSFSGDSKLKALLHGHSYSAHAMGCATAAKAIQWFKDPETNHNITSQGKTLRELWDEELVQQISSHSAVQRVVVIGTLFALELKADASNSGYASLYAKSLLIMLREDGIFTRPLGNVIYLMCGPCTSPEICRRLLTKLYKRLGEFNRT

SEQ ID NO: 33 - protein, 833 aa, Synthetic construct
  source 1..833: note = Arabidopsis thaliana BioDA protein F348V
MIPVTATLIRHRLRHLRHRIRFKSTSVSPFHLPLNHPTYLIWSANTSLGKTLVSTGIAASFLLQQPSSSATKLLYLKPIQTGFPSDSDSRFVFSKLDSLSLRRQIPISISNSVLHSSLPAAKSLGLNVEVSESGMCSLNFRDEKTVTGAPELLCKTLYAWEAAISPHLAAERENATVEDSVVLQMIEKCLKEEMECGVKSEKSDLLCLVETAGGVASPGPSGTLQCDLYRPFRLPGILVGDGRLGGISGTIAAYESLKLRGYDIAAVVFEDHGLVNEVPLTSYLRNKVPVLVLPPVPKDPSDDLIEWFVESDGVFKALKETMVLANLERLERLNGMAKLAGEVFWWPVTQHKLVHQETVTVIDSRCGENFSIYKASDNSSLSQQFDACASWWTQGPDPTFQAELAREMGYTAARFGHVMFPENVYEPALKCAELLLDGVGKGWASRVYFSDNGSTAIEIALKMAFRKFCVDHNFCEATEEEKHIVVKVIALRGSYHGDTLGAMEAQAPSPYTGFLQQPWYTGRGLFLDPPTVFLSNGSWNISLPESFSEIAPEYGTFTSRDEIFDKSRDASTLARIYSAYLSKHLQEHSGVRQSAHVGALIIEPVIHGAGGMHMVDPLFQRVLVNECRNRKIPVIFDEVFTGFWRLGVETTTELLGCKPDIACFAKLLTGGMVPLAVTLATDAVFDSFSGDSKLKALLHGHSYSAHAMGCATAAKAIQWFKDPETNHNITSQGKTLRELWDEELVQQISSHSAVQRVVVIGTLFALELKADASNSGYASLYAKSLLIMLREDGIFTRPLGNVIYLMCGPCTSPEICRRLLTKLYKRLGEFNRT

SEQ ID NO: 34 - protein, 832 aa, Synthetic construct
  source 1..832: note = Arabidopsis thaliana BioDA protein G513DEL
MIPVTATLIRHRLRHLRHRIRFKSTSVSPFHLPLNHPTYLIWSANTSLGKTLVSTGIAASFLLQQPSSSATKLLYLKPIQTGFPSDSDSRFVFSKLDSLSLRRQIPISISNSVLHSSLPAAKSLGLNVEVSESGMCSLNFRDEKTVTGAPELLCKTLYAWEAAISPHLAAERENATVEDSVVLQMIEKCLKEEMECGVKSEKSDLLCLVETAGGVASPGPSGTLQCDLYRPFRLPGILVGDGRLGGISGTIAAYESLKLRGYDIAAVVFEDHGLVNEVPLTSYLRNKVPVLVLPPVPKDPSDDLIEWFVESDGVFKALKETMVLANLERLERLNGMAKLAGEVFWWPFTQHKLVHQETVTVIDSRCGENFSIYKASDNSSLSQQFDACASWWTQGPDPTFQAELAREMGYTAARFGHVMFPENVYEPALKCAELLLDGVGKGWASRVYFSDNGSTAIEIALKMAFRKFCVDHNFCEATEEEKHIVVKVIALRGSYHGDTLGAMEAQAPSPYTFLQQPWYTGRGLFLDPPTVFLSNGSWNISLPESFSEIAPEYGTFTSRDEIFDKSRDASTLARIYSAYLSKHLQEHSGVRQSAHVGALIIEPVIHGAGGMHMVDPLFQRVLVNECRNRKIPVIFDEVFTGFWRLGVETTTELLGCKPDIACFAKLLTGGMVPLAVTLATDAVFDSFSGDSKLKALLHGHSYSAHAMGCATAAKAIQWFKDPETNHNITSQGKTLRELWDEELVQQISSHSAVQRVVVIGTLFALELKADASNSGYASLYAKSLLIMLREDGIFTRPLGNVIYLMCGPCTSPEICRRLLTKLYKRLGEFNRT

SEQ ID NO: 35 - protein, 833 aa, Synthetic construct
  source 1..833: note = Arabidopsis thaliana BioDA protein G513L
MIPVTATLIRHRLRHLRHRIRFKSTSVSPFHLPLNHPTYLIWSANTSLGKTLVSTGIAASFLLQQPSSSATKLLYLKPIQTGFPSDSDSRFVFSKLDSLSLRRQIPISISNSVLHSSLPAAKSLGLNVEVSESGMCSLNFRDEKTVTGAPELLCKTLYAWEAAISPHLAAERENATVEDSVVLQMIEKCLKEEMECGVKSEKSDLLCLVETAGGVASPGPSGTLQCDLYRPFRLPGILVGDGRLGGISGTIAAYESLKLRGYDIAAVVFEDHGLVNEVPLTSYLRNKVPVLVLPPVPKDPSDDLIEWFVESDGVFKALKETMVLANLERLERLNGMAKLAGEVFWWPFTQHKLVHQETVTVIDSRCGENFSIYKASDNSSLSQQFDACASWWTQGPDPTFQAELAREMGYTAARFGHVMFPENVYEPALKCAELLLDGVGKGWASRVYFSDNGSTAIEIALKMAFRKFCVDHNFCEATEEEKHIVVKVIALRGSYHGDTLGAMEAQAPSPYTLFLQQPWYTGRGLFLDPPTVFLSNGSWNISLPESFSEIAPEYGTFTSRDEIFDKSRDASTLARIYSAYLSKHLQEHSGVRQSAHVGALIIEPVIHGAGGMHMVDPLFQRVLVNECRNRKIPVIFDEVFTGFWRLGVETTTELLGCKPDIACFAKLLTGGMVPLAVTLATDAVFDSFSGDSKLKALLHGHSYSAHAMGCATAAKAIQWFKDPETNHNITSQGKTLRELWDEELVQQISSHSAVQRVVVIGTLFALELKADASNSGYASLYAKSLLIMLREDGIFTRPLGNVIYLMCGPCTSPEICRRLLTKLYKRLGEFNRT

SEQ ID NO: 36 - protein, 833 aa, Synthetic construct
  source 1..833: note = Arabidopsis thaliana BioDA protein G513P
MIPVTATLIRHRLRHLRHRIRFKSTSVSPFHLPLNHPTYLIWSANTSLGKTLVSTGIAASFLLQQPSSSATKLLYLKPIQTGFPSDSDSRFVFSKLDSLSLRRQIPISISNSVLHSSLPAAKSLGLNVEVSESGMCSLNFRDEKTVTGAPELLCKTLYAWEAAISPHLAAERENATVEDSVVLQMIEKCLKEEMECGVKSEKSDLLCLVETAGGVASPGPSGTLQCDLYRPFRLPGILVGDGRLGGISGTIAAYESLKLRGYDIAAVVFEDHGLVNEVPLTSYLRNKVPVLVLPPVPKDPSDDLIEWFVESDGVFKALKETMVLANLERLERLNGMAKLAGEVFWWPFTQHKLVHQETVTVIDSRCGENFSIYKASDNSSLSQQFDACASWWTQGPDPTFQAELAREMGYTAARFGHVMFPENVYEPALKCAELLLDGVGKGWASRVYFSDNGSTAIEIALKMAFRKFCVDHNFCEATEEEKHIVVKVIALRGSYHGDTLGAMEAQAPSPYTPFLQQPWYTGRGLFLDPPTVFLSNGSWNISLPESFSEIAPEYGTFTSRDEIFDKSRDASTLARIYSAYLSKHLQEHSGVRQSAHVGALIIEPVIHGAGGMHMVDPLFQRVLVNECRNRKIPVIFDEVFTGFWRLGVETTTELLGCKPDIACFAKLLTGGMVPLAVTLATDAVFDSFSGDSKLKALLHGHSYSAHAMGCATAAKAIQWFKDPETNHNITSQGKTLRELWDEELVQQISSHSAVQRVVVIGTLFALELKADASNSGYASLYAKSLLIMLREDGIFTRPLGNVIYLMCGPCTSPEICRRLLTKLYKRLGEFNRT

SEQ ID NO: 37 - protein, 833 aa, Synthetic construct
  source 1..833: note = Arabidopsis thaliana BioDA protein G608E
MIPVTATLIRHRLRHLRHRIRFKSTSVSPFHLPLNHPTYLIWSANTSLGKTLVSTGIAASFLLQQPSSSATKLLYLKPIQTGFPSDSDSRFVFSKLDSLSLRRQIPISISNSVLHSSLPAAKSLGLNVEVSESGMCSLNFRDEKTVTGAPELLCKTLYAWEAAISPHLAAERENATVEDSVVLQMIEKCLKEEMECGVKSEKSDLLCLVETAGGVASPGPSGTLQCDLYRPFRLPGILVGDGRLGGISGTIAAYESLKLRGYDIAAVVFEDHGLVNEVPLTSYLRNKVPVLVLPPVPKDPSDDLIEWFVESDGVFKALKETMVLANLERLERLNGMAKLAGEVFWWPFTQHKLVHQETVTVIDSRCGENFSIYKASDNSSLSQQFDACASWWTQGPDPTFQAELAREMGYTAARFGHVMFPENVYEPALKCAELLLDGVGKGWASRVYFSDNGSTAIEIALKMAFRKFCVDHNFCEATEEEKHIVVKVIALRGSYHGDTLGAMEAQAPSPYTGFLQQPWYTGRGLFLDPPTVFLSNGSWNISLPESFSEIAPEYGTFTSRDEIFDKSRDASTLARIYSAYLSKHLQEHSGVRQSAHVGALIIEPVIHEAGGMHMVDPLFQRVLVNECRNRKIPVIFDEVFTGFWRLGVETTTELLGCKPDIACFAKLLTGGMVPLAVTLATDAVFDSFSGDSKLKALLHGHSYSAHAMGCATAAKAIQWFKDPETNHNITSQGKTLRELWDEELVQQISSHSAVQRVVVIGTLFALELKADASNSGYASLYAKSLLIMLREDGIFTRPLGNVIYLMCGPCTSPEICRRLLTKLYKRLGEFNRT

SEQ ID NO: 38 - protein, 833 aa, Synthetic construct
  source 1..833: note = Arabidopsis thaliana BioDA protein G700A
MIPVTATLIRHRLRHLRHRIRFKSTSVSPFHLPLNHPTYLIWSANTSLGKTLVSTGIAASFLLQQPSSSATKLLYLKPIQTGFPSDSDSRFVFSKLDSLSLRRQIPISISNSVLHSSLPAAKSLGLNVEVSESGMCSLNFRDEKTVTGAPELLCKTLYAWEAAISPHLAAERENATVEDSVVLQMIEKCLKEEMECGVKSEKSDLLCLVETAGGVASPGPSGTLQCDLYRPFRLPGILVGDGRLGGISGTIAAYESLKLRGYDIAAVVFEDHGLVNEVPLTSYLRNKVPVLVLPPVPKDPSDDLIEWFVESDGVFKALKETMVLANLERLERLNGMAKLAGEVFWWPFTQHKLVHQETVTVIDSRCGENFSIYKASDNSSLSQQFDACASWWTQGPDPTFQAELAREMGYTAARFGHVMFPENVYEPALKCAELLLDGVGKGWASRVYFSDNGSTAIEIALKMAFRKFCVDHNFCEATEEEKHIVVKVIALRGSYHGDTLGAMEAQAPSPYTGFLQQPWYTGRGLFLDPPTVFLSNGSWNISLPESFSEIAPEYGTFTSRDEIFDKSRDASTLARIYSAYLSKHLQEHSGVRQSAHVGALIIEPVIHGAGGMHMVDPLFQRVLVNECRNRKIPVIFDEVFTGFWRLGVETTTELLGCKPDIACFAKLLTGGMVPLAVTLATDAVFDSFSGDSKLKALLHAHSYSAHAMGCATAAKAIQWFKDPETNHNITSQGKTLRELWDEELVQQISSHSAVQRVVVIGTLFALELKADASNSGYASLYAKSLLIMLREDGIFTRPLGNVIYLMCGPCTSPEICRRLLTKLYKRLGEFNRT

SEQ ID NO: 39 - protein, 833 aa, Synthetic construct
  source 1..833: note = Arabidopsis thaliana BioDA protein G700S
MIPVTATLIRHRLRHLRHRIRFKSTSVSPFHLPLNHPTYLIWSANTSLGKTLVSTGIAASFLLQQPSSSATKLLYLKPIQTGFPSDSDSRFVFSKLDSLSLRRQIPISISNSVLHSSLPAAKSLGLNVEVSESGMCSLNFRDEKTVTGAPELLCKTLYAWEAAISPHLAAERENATVEDSVVLQMIEKCLKEEMECGVKSEKSDLLCLVETAGGVASPGPSGTLQCDLYRPFRLPGILVGDGRLGGISGTIAAYESLKLRGYDIAAVVFEDHGLVNEVPLTSYLRNKVPVLVLPPVPKDPSDDLIEWFVESDGVFKALKETMVLANLERLERLNGMAKLAGEVFWWPFTQHKLVHQETVTVIDSRCGENFSIYKASDNSSLSQQFDACASWWTQGPDPTFQAELAREMGYTAARFGHVMFPENVYEPALKCAELLLDGVGKGWASRVYFSDNGSTAIEIALKMAFRKFCVDHNFCEATEEEKHIVVKVIALRGSYHGDTLGAMEAQAPSPYTGFLQQPWYTGRGLFLDPPTVFLSNGSWNISLPESFSEIAPEYGTFTSRDEIFDKSRDASTLARIYSAYLSKHLQEHSGVRQSAHVGALIIEPVIHGAGGMHMVDPLFQRVLVNECRNRKIPVIFDEVFTGFWRLGVETTTELLGCKPDIACFAKLLTGGMVPLAVTLATDAVFDSFSGDSKLKALLHSHSYSAHAMGCATAAKAIQWFKDPETNHNITSQGKTLRELWDEELVQQISSHSAVQRVVVIGTLFALELKADASNSGYASLYAKSLLIMLREDGIFTRPLGNVIYLMCGPCTSPEICRRLLTKLYKRLGEFNRT

SEQ ID NO: 40 - protein, 833 aa, Synthetic construct
  source 1..833: note = Arabidopsis thaliana BioDA protein L786S
MIPVTATLIRHRLRHLRHRIRFKSTSVSPFHLPLNHPTYLIWSANTSLGKTLVSTGIAASFLLQQPSSSATKLLYLKPIQTGFPSDSDSRFVFSKLDSLSLRRQIPISISNSVLHSSLPAAKSLGLNVEVSESGMCSLNFRDEKTVTGAPELLCKTLYAWEAAISPHLAAERENATVEDSVVLQMIEKCLKEEMECGVKSEKSDLLCLVETAGGVASPGPSGTLQCDLYRPFRLPGILVGDGRLGGISGTIAAYESLKLRGYDIAAVVFEDHGLVNEVPLTSYLRNKVPVLVLPPVPKDPSDDLIEWFVESDGVFKALKETMVLANLERLERLNGMAKLAGEVFWWPFTQHKLVHQETVTVIDSRCGENFSIYKASDNSSLSQQFDACASWWTQGPDPTFQAELAREMGYTAARFGHVMFPENVYEPALKCAELLLDGVGKGWASRVYFSDNGSTAIEIALKMAFRKFCVDHNFCEATEEEKHIVVKVIALRGSYHGDTLGAMEAQAPSPYTGFLQQPWYTGRGLFLDPPTVFLSNGSWNISLPESFSEIAPEYGTFTSRDEIFDKSRDASTLARIYSAYLSKHLQEHSGVRQSAHVGALIIEPVIHGAGGMHMVDPLFQRVLVNECRNRKIPVIFDEVFTGFWRLGVETTTELLGCKPDIACFAKLLTGGMVPLAVTLATDAVFDSFSGDSKLKALLHGHSYSAHAMGCATAAKAIQWFKDPETNHNITSQGKTLRELWDEELVQQISSHSAVQRVVVIGTLFALELKADASNSGYASLYAKSLSIMLREDGIFTRPLGNVIYLMCGPCTSPEICRRLLTKLYKRLGEFNRT

SEQ ID NO: 41 - protein, 833 aa, Synthetic construct
  source 1..833: note = Arabidopsis thaliana BioDA protein P421L
MIPVTATLIRHRLRHLRHRIRFKSTSVSPFHLPLNHPTYLIWSANTSLGKTLVSTGIAASFLLQQPSSSATKLLYLKPIQTGFPSDSDSRFVFSKLDSLSLRRQIPISISNSVLHSSLPAAKSLGLNVEVSESGMCSLNFRDEKTVTGAPELLCKTLYAWEAAISPHLAAERENATVEDSVVLQMIEKCLKEEMECGVKSEKSDLLCLVETAGGVASPGPSGTLQCDLYRPFRLPGILVGDGRLGGISGTIAAYESLKLRGYDIAAVVFEDHGLVNEVPLTSYLRNKVPVLVLPPVPKDPSDDLIEWFVESDGVFKALKETMVLANLERLERLNGMAKLAGEVFWWPFTQHKLVHQETVTVIDSRCGENFSIYKASDNSSLSQQFDACASWWTQGPDPTFQAELAREMGYTAARFGHVMFLENVYEPALKCAELLLDGVGKGWASRVYFSDNGSTAIEIALKMAFRKFCVDHNFCEATEEEKHIVVKVIALRGSYHGDTLGAMEAQAPSPYTGFLQQPWYTGRGLFLDPPTVFLSNGSWNISLPESFSEIAPEYGTFTSRDEIFDKSRDASTLARIYSAYLSKHLQEHSGVRQSAHVGALIIEPVIHGAGGMHMVDPLFQRVLVNECRNRKIPVIFDEVFTGFWRLGVETTTELLGCKPDIACFAKLLTGGMVPLAVTLATDAVFDSFSGDSKLKALLHGHSYSAHAMGCATAAKAIQWFKDPETNHNITSQGKTLRELWDEELVQQISSHSAVQRVVVIGTLFALELKADASNSGYASLYAKSLLIMLREDGIFTRPLGNVIYLMCGPCTSPEICRRLLTKLYKRLGEFNRT

SEQ ID NO: 42 - protein, 832 aa, Synthetic construct
  source 1..832: note = Arabidopsis thaliana BioDA protein P508DEL
MIPVTATLIRHRLRHLRHRIRFKSTSVSPFHLPLNHPTYLIWSANTSLGKTLVSTGIAASFLLQQPSSSATKLLYLKPIQTGFPSDSDSRFVFSKLDSLSLRRQIPISISNSVLHSSLPAAKSLGLNVEVSESGMCSLNFRDEKTVTGAPELLCKTLYAWEAAISPHLAAERENATVEDSVVLQMIEKCLKEEMECGVKSEKSDLLCLVETAGGVASPGPSGTLQCDLYRPFRLPGILVGDGRLGGISGTIAAYESLKLRGYDIAAVVFEDHGLVNEVPLTSYLRNKVPVLVLPPVPKDPSDDLIEWFVESDGVFKALKETMVLANLERLERLNGMAKLAGEVFWWPFTQHKLVHQETVTVIDSRCGENFSIYKASDNSSLSQQFDACASWWTQGPDPTFQAELAREMGYTAARFGHVMFPENVYEPALKCAELLLDGVGKGWASRVYFSDNGSTAIEIALKMAFRKFCVDHNFCEATEEEKHIVVKVIALRGSYHGDTLGAMEAQASPYTGFLQQPWYTGRGLFLDPPTVFLSNGSWNISLPESFSEIAPEYGTFTSRDEIFDKSRDASTLARIYSAYLSKHLQEHSGVRQSAHVGALIIEPVIHGAGGMHMVDPLFQRVLVNECRNRKIPVIFDEVFTGFWRLGVETTTELLGCKPDIACFAKLLTGGMVPLAVTLATDAVFDSFSGDSKLKALLHGHSYSAHAMGCATAAKAIQWFKDPETNHNITSQGKTLRELWDEELVQQISSHSAVQRVVVIGTLFALELKADASNSGYASLYAKSLLIMLREDGIFTRPLGNVIYLMCGPCTSPEICRRLLTKLYKRLGEFNRT

SEQ ID NO: 43 - protein, 833 aa, Synthetic construct
  source 1..833: note = Arabidopsis thaliana BioDA protein P508L
MIPVTATLIRHRLRHLRHRIRFKSTSVSPFHLPLNHPTYLIWSANTSLGKTLVSTGIAASFLLQQPSSSATKLLYLKPIQTGFPSDSDSRFVFSKLDSLSLRRQIPISISNSVLHSSLPAAKSLGLNVEVSESGMCSLNFRDEKTVTGAPELLCKTLYAWEAAISPHLAAERENATVEDSVVLQMIEKCLKEEMECGVKSEKSDLLCLVETAGGVASPGPSGTLQCDLYRPFRLPGILVGDGRLGGISGTIAAYESLKLRGYDIAAVVFEDHGLVNEVPLTSYLRNKVPVLVLPPVPKDPSDDLIEWFVESDGVFKALKETMVLANLERLERLNGMAKLAGEVFWWPFTQHKLVHQETVTVIDSRCGENFSIYKASDNSSLSQQFDACASWWTQGPDPTFQAELAREMGYTAARFGHVMFPENVYEPALKCAELLLDGVGKGWASRVYFSDNGSTAIEIALKMAFRKFCVDHNFCEATEEEKHIVVKVIALRGSYHGDTLGAMEAQALSPYTGFLQQPWYTGRGLFLDPPTVFLSNGSWNISLPESFSEIAPEYGTFTSRDEIFDKSRDASTLARIYSAYLSKHLQEHSGVRQSAHVGALIIEPVIHGAGGMHMVDPLFQRVLVNECRNRKIPVIFDEVFTGFWRLGVETTTELLGCKPDIACFAKLLTGGMVPLAVTLATDAVFDSFSGDSKLKALLHGHSYSAHAMGCATAAKAIQWFKDPETNHNITSQGKTLRELWDEELVQQISSHSAVQRVVVIGTLFALELKADASNSGYASLYAKSLLIMLREDGIFTRPLGNVIYLMCGPCTSPEICRRLLTKLYKRLGEFNRT

SEQ ID NO: 44 - protein, 833 aa, Synthetic construct
  source 1..833: note = Arabidopsis thaliana BioDA protein P508T
MIPVTATLIRHRLRHLRHRIRFKSTSVSPFHLPLNHPTYLIWSANTSLGKTLVSTGIAASFLLQQPSSSATKLLYLKPIQTGFPSDSDSRFVFSKLDSLSLRRQIPISISNSVLHSSLPAAKSLGLNVEVSESGMCSLNFRDEKTVTGAPELLCKTLYAWEAAISPHLAAERENATVEDSVVLQMIEKCLKEEMECGVKSEKSDLLCLVETAGGVASPGPSGTLQCDLYRPFRLPGILVGDGRLGGISGTIAAYESLKLRGYDIAAVVFEDHGLVNEVPLTSYLRNKVPVLVLPPVPKDPSDDLIEWFVESDGVFKALKETMVLANLERLERLNGMAKLAGEVFWWPFTQHKLVHQETVTVIDSRCGENFSIYKASDNSSLSQQFDACASWWTQGPDPTFQAELAREMGYTAARFGHVMFPENVYEPALKCAELLLDGVGKGWASRVYFSDNGSTAIEIALKMAFRKFCVDHNFCEATEEEKHIVVKVIALRGSYHGDTLGAMEAQATSPYTGFLQQPWYTGRGLFLDPPTVFLSNGSWNISLPESFSEIAPEYGTFTSRDEIFDKSRDASTLARIYSAYLSKHLQEHSGVRQSAHVGALIIEPVIHGAGGMHMVDPLFQRVLVNECRNRKIPVIFDEVFTGFWRLGVETTTELLGCKPDIACFAKLLTGGMVPLAVTLATDAVFDSFSGDSKLKALLHGHSYSAHAMGCATAAKAIQWFKDPETNHNITSQGKTLRELWDEELVQQISSHSAVQRVVVIGTLFALELKADASNSGYASLYAKSLLIMLREDGIFTRPLGNVIYLMCGPCTSPEICRRLLTKLYKRLGEFNRT

SEQ ID NO: 45 - protein, 833 aa, Synthetic construct
  source 1..833: note = Arabidopsis thaliana BioDA protein P510L
MIPVTATLIRHRLRHLRHRIRFKSTSVSPFHLPLNHPTYLIWSANTSLGKTLVSTGIAASFLLQQPSSSATKLLYLKPIQTGFPSDSDSRFVFSKLDSLSLRRQIPISISNSVLHSSLPAAKSLGLNVEVSESGMCSLNFRDEKTVTGAPELLCKTLYAWEAAISPHLAAERENATVEDSVVLQMIEKCLKEEMECGVKSEKSDLLCLVETAGGVASPGPSGTLQCDLYRPFRLPGILVGDGRLGGISGTIAAYESLKLRGYDIAAVVFEDHGLVNEVPLTSYLRNKVPVLVLPPVPKDPSDDLIEWFVESDGVFKALKETMVLANLERLERLNGMAKLAGEVFWWPFTQHKLVHQETVTVIDSRCGENFSIYKASDNSSLSQQFDACASWWTQGPDPTFQAELAREMGYTAARFGHVMFPENVYEPALKCAELLLDGVGKGWASRVYFSDNGSTAIEIALKMAFRKFCVDHNFCEATEEEKHIVVKVIALRGSYHGDTLGAMEAQAPSLYTGFLQQPWYTGRGLFLDPPTVFLSNGSWNISLPESFSEIAPEYGTFTSRDEIFDKSRDASTLARIYSAYLSKHLQEHSGVRQSAHVGALIIEPVIHGAGGMHMVDPLFQRVLVNECRNRKIPVIFDEVFTGFWRLGVETTTELLGCKPDIACFAKLLTGGMVPLAVTLATDAVFDSFSGDSKLKALLHGHSYSAHAMGCATAAKAIQWFKDPETNHNITSQGKTLRELWDEELVQQISSHSAVQRVVVIGTLFALELKADASNSGYASLYAKSLLIMLREDGIFTRPLGNVIYLMCGPCTSPEICRRLLTKLYKRLGEFNRT

SEQ ID NO: 46 - protein, 833 aa, Synthetic construct
  source 1..833: note = Arabidopsis thaliana BioDA protein Q506A
MIPVTATLIRHRLRHLRHRIRFKSTSVSPFHLPLNHPTYLIWSANTSLGKTLVSTGIAASFLLQQPSSSATKLLYLKPIQTGFPSDSDSRFVFSKLDSLSLRRQIPISISNSVLHSSLPAAKSLGLNVEVSESGMCSLNFRDEKTVTGAPELLCKTLYAWEAAISPHLAAERENATVEDSVVLQMIEKCLKEEMECGVKSEKSDLLCLVETAGGVASPGPSGTLQCDLYRPFRLPGILVGDGRLGGISGTIAAYESLKLRGYDIAAVVFEDHGLVNEVPLTSYLRNKVPVLVLPPVPKDPSDDLIEWFVESDGVFKALKETMVLANLERLERLNGMAKLAGEVFWWPFTQHKLVHQETVTVIDSRCGENFSIYKASDNSSLSQQFDACASWWTQGPDPTFQAELAREMGYTAARFGHVMFPENVYEPALKCAELLLDGVGKGWASRVYFSDNGSTAIEIALKMAFRKFCVDHNFCEATEEEKHIVVKVIALRGSYHGDTLGAMEAAAPSPYTGFLQQPWYTGRGLFLDPPTVFLSNGSWNISLPESFSEIAPEYGTFTSRDEIFDKSRDASTLARIYSAYLSKHLQEHSGVRQSAHVGALIIEPVIHGAGGMHMVDPLFQRVLVNECRNRKIPVIFDEVFTGFWRLGVETTTELLGCKPDIACFAKLLTGGMVPLAVTLATDAVFDSFSGDSKLKALLHGHSYSAHAMGCATAAKAIQWFKDPETNHNITSQGKTLRELWDEELVQQISSHSAVQRVVVIGTLFALELKADASNSGYASLYAKSLLIMLREDGIFTRPLGNVIYLMCGPCTSPEICRRLLTKLYKRLGEFNRT

SEQ ID NO: 47 - protein, 833 aa, Synthetic construct
  source 1..833: note = Arabidopsis thaliana BioDA protein Q516C
MIPVTATLIRHRLRHLRHRIRFKSTSVSPFHLPLNHPTYLIWSANTSLGKTLVSTGIAASFLLQQPSSSATKLLYLKPIQTGFPSDSDSRFVFSKLDSLSLRRQIPISISNSVLHSSLPAAKSLGLNVEVSESGMCSLNFRDEKTVTGAPELLCKTLYAWEAAISPHLAAERENATVEDSVVLQMIEKCLKEEMECGVKSEKSDLLCLVETAGGVASPGPSGTLQCDLYRPFRLPGILVGDGRLGGISGTIAAYESLKLRGYDIAAVVFEDHGLVNEVPLTSYLRNKVPVLVLPPVPKDPSDDLIEWFVESDGVFKALKETMVLANLERLERLNGMAKLAGEVFWWPFTQHKLVHQETVTVIDSRCGENFSIYKASDNSSLSQQFDACASWWTQGPDPTFQAELAREMGYTAARFGHVMFPENVYEPALKCAELLLDGVGKGWASRVYFSDNGSTAIEIALKMAFRKFCVDHNFCEATEEEKHIVVKVIALRGSYHGDTLGAMEAQAPSPYTGFLCQPWYTGRGLFLDPPTVFLSNGSWNISLPESFSEIAPEYGTFTSRDEIFDKSRDASTLARIYSAYLSKHLQEHSGVRQSAHVGALIIEPVIHGAGGMHMVDPLFQRVLVNECRNRKIPVIFDEVFTGFWRLGVETTTELLGCKPDIACFAKLLTGGMVPLAVTLATDAVFDSFSGDSKLKALLHGHSYSAHAMGCATAAKAIQWFKDPETNHNITSQGKTLRELWDEELVQQISSHSAVQRVVVIGTLFALELKADASNSGYASLYAKSLLIMLREDGIFTRPLGNVIYLMCGPCTSPEICRRLLTKLYKRLGEFNRT

SEQ ID NO: 48 - protein, 833 aa, Synthetic construct
  source 1..833: note = Arabidopsis thaliana BioDA protein Q517D
MIPVTATLIRHRLRHLRHRIRFKSTSVSPFHLPLNHPTYLIWSANTSLGKTLVSTGIAASFLLQQPSSSATKLLYLKPIQTGFPSDSDSRFVFSKLDSLSLRRQIPISISNSVLHSSLPAAKSLGLNVEVSESGMCSLNFRDEKTVTGAPELLCKTLYAWEAAISPHLAAERENATVEDSVVLQMIEKCLKEEMECGVKSEKSDLLCLVETAGGVASPGPSGTLQCDLYRPFRLPGILVGDGRLGGISGTIAAYESLKLRGYDIAAVVFEDHGLVNEVPLTSYLRNKVPVLVLPPVPKDPSDDLIEWFVESDGVFKALKETMVLANLERLERLNGMAKLAGEVFWWPFTQHKLVHQETVTVIDSRCGENFSIYKASDNSSLSQQFDACASWWTQGPDPTFQAELAREMGYTAARFGHVMFPENVYEPALKCAELLLDGVGKGWASRVYFSDNGSTAIEIALKMAFRKFCVDHNFCEATEEEKHIVVKVIALRGSYHGDTLGAMEAQAPSPYTGFLQDPWYTGRGLFLDPPTVFLSNGSWNISLPESFSEIAPEYGTFTSRDEIFDKSRDASTLARIYSAYLSKHLQEHSGVRQSAHVGALIIEPVIHGAGGMHMVDPLFQRVLVNECRNRKIPVIFDEVFTGFWRLGVETTTELLGCKPDIACFAKLLTGGMVPLAVTLATDAVFDSFSGDSKLKALLHGHSYSAHAMGCATAAKAIQWFKDPETNHNITSQGKTLRELWDEELVQQISSHSAVQRVVVIGTLFALELKADASNSGYASLYAKSLLIMLREDGIFTRPLGNVIYLMCGPCTSPEICRRLLTKLYKRLGEFNRT

SEQ ID NO: 49 - protein, 833 aa, Synthetic construct
  source 1..833: note = Arabidopsis thaliana BioDA protein Q517F
MIPVTATLIRHRLRHLRHRIRFKSTSVSPFHLPLNHPTYLIWSANTSLGKTLVSTGIAASFLLQQPSSSATKLLYLKPIQTGFPSDSDSRFVFSKLDSLSLRRQIPISISNSVLHSSLPAAKSLGLNVEVSESGMCSLNFRDEKTVTGAPELLCKTLYAWEAAISPHLAAERENATVEDSVVLQMIEKCLKEEMECGVKSEKSDLLCLVETAGGVASPGPSGTLQCDLYRPFRLPGILVGDGRLGGISGTIAAYESLKLRGYDIAAVVFEDHGLVNEVPLTSYLRNKVPVLVLPPVPKDPSDDLIEWFVESDGVFKALKETMVLANLERLERLNGMAKLAGEVFWWPFTQHKLVHQETVTVIDSRCGENFSIYKASDNSSLSQQFDACASWWTQGPDPTFQAELAREMGYTAARFGHVMFPENVYEPALKCAELLLDGVGKGWASRVYFSDNGSTAIEIALKMAFRKFCVDHNFCEATEEEKHIVVKVIALRGSYHGDTLGAMEAQAPSPYTGFLQFPWYTGRGLFLDPPTVFLSNGSWNISLPESFSEIAPEYGTFTSRDEIFDKSRDASTLARIYSAYLSKHLQEHSGVRQSAHVGALIIEPVIHGAGGMHMVDPLFQRVLVNECRNRKIPVIFDEVFTGFWRLGVETTTELLGCKPDIACFAKLLTGGMVPLAVTLATDAVFDSFSGDSKLKALLHGHSYSAHAMGCATAAKAIQWFKDPETNHNITSQGKTLRELWDEELVQQISSHSAVQRVVVIGTLFALELKADASNSGYASLYAKSLLIMLREDGIFTRPLGNVIYLMCGPCTSPEICRRLLTKLYKRLGEFNRT

SEQ ID NO: 50 - protein, 833 aa, Synthetic construct
  source 1..833: note = Arabidopsis thaliana BioDA protein Q517M
MIPVTATLIRHRLRHLRHRIRFKSTSVSPFHLPLNHPTYLIWSANTSLGKTLVSTGIAASFLLQQPSSSATKLLYLKPIQTGFPSDSDSRFVFSKLDSLSLRRQIPISISNSVLHSSLPAAKSLGLNVEVSESGMCSLNFRDEKTVTGAPELLCKTLYAWEAAISPHLAAERENATVEDSVVLQMIEKCLKEEMECGVKSEKSDLLCLVETAGGVASPGPSGTLQCDLYRPFRLPGILVGDGRLGGISGTIAAYESLKLRGYDIAAVVFEDHGLVNEVPLTSYLRNKVPVLVLPPVPKDPSDDLIEWFVESDGVFKALKETMVLANLERLERLNGMAKLAGEVFWWPFTQHKLVHQETVTVIDSRCGENFSIYKASDNSSLSQQFDACASWWTQGPDPTFQAELAREMGYTAARFGHVMFPENVYEPALKCAELLLDGVGKGWASRVYFSDNGSTAIEIALKMAFRKFCVDHNFCEATEEEKHIVVKVIALRGSYHGDTLGAMEAQAPSPYTGFLQMPWYTGRGLFLDPPTVFLSNGSWNISLPESFSEIAPEYGTFTSRDEIFDKSRDASTLARIYSAYLSKHLQEHSGVRQSAHVGALIIEPVIHGAGGMHMVDPLFQRVLVNECRNRKIPVIFDEVFTGFWRLGVETTTELLGCKPDIACFAKLLTGGMVPLAVTLATDAVFDSFSGDSKLKALLHGHSYSAHAMGCATAAKAIQWFKDPETNHNITSQGKTLRELWDEELVQQISSHSAVQRVVVIGTLFALELKADASNSGYASLYAKSLLIMLREDGIFTRPLGNVIYLMCGPCTSPEICRRLLTKLYKRLGEFNRT

SEQ ID NO: 51 - protein, 833 aa, Synthetic construct
  source 1..833: note = Arabidopsis thaliana BioDA protein Q517T
MIPVTATLIRHRLRHLRHRIRFKSTSVSPFHLPLNHPTYLIWSANTSLGKTLVSTGIAASFLLQQPSSSATKLLYLKPIQTGFPSDSDSRFVFSKLDSLSLRRQIPISISNSVLHSSLPAAKSLGLNVEVSESGMCSLNFRDEKTVTGAPELLCKTLYAWEAAISPHLAAERENATVEDSVVLQMIEKCLKEEMECGVKSEKSDLLCLVETAGGVASPGPSGTLQCDLYRPFRLPGILVGDGRLGGISGTIAAYESLKLRGYDIAAVVFEDHGLVNEVPLTSYLRNKVPVLVLPPVPKDPSDDLIEWFVESDGVFKALKETMVLANLERLERLNGMAKLAGEVFWWPFTQHKLVHQETVTVIDSRCGENFSIYKASDNSSLSQQFDACASWWTQGPDPTFQAELAREMGYTAARFGHVMFPENVYEPALKCAELLLDGVGKGWASRVYFSDNGSTAIEIALKMAFRKFCVDHNFCEATEEEKHIVVKVIALRGSYHGDTLGAMEAQAPSPYTGFLQTPWYTGRGLFLDPPTVFLSNGSWNISLPESFSEIAPEYGTFTSRDEIFDKSRDASTLARIYSAYLSKHLQEHSGVRQSAHVGALIIEPVIHGAGGMHMVDPLFQRVLVNECRNRKIPVIFDEVFTGFWRLGVETTTELLGCKPDIACFAKLLTGGMVPLAVTLATDAVFDSFSGDSKLKALLHGHSYSAHAMGCATAAKAIQWFKDPETNHNITSQGKTLRELWDEELVQQISSHSAVQRVVVIGTLFALELKADASNSGYASLYAKSLLIMLREDGIFTRPLGNVIYLMCGPCTSPEICRRLLTKLYKRLGEFNRT

SEQ ID NO: 52 - protein, 833 aa, Synthetic construct
  source 1..833: note = Arabidopsis thaliana BioDA protein Q517Y
MIPVTATLIRHRLRHLRHRIRFKSTSVSPFHLPLNHPTYLIWSANTSLGKTLVSTGIAASFLLQQPSSSATKLLYLKPIQTGFPSDSDSRFVFSKLDSLSLRRQIPISISNSVLHSSLPAAKSLGLNVEVSESGMCSLNFRDEKTVTGAPELLCKTLYAWEAAISPHLAAERENATVEDSVVLQMIEKCLKEEMECGVKSEKSDLLCLVETAGGVASPGPSGTLQCDLYRPFRLPGILVGDGRLGGISGTIAAYESLKLRGYDIAAVVFEDHGLVNEVPLTSYLRNKVPVLVLPPVPKDPSDDLIEWFVESDGVFKALKETMVLANLERLERLNGMAKLAGEVFWWPFTQHKLVHQETVTVIDSRCGENFSIYKASDNSSLSQQFDACASWWTQGPDPTFQAELAREMGYTAARFGHVMFPENVYEPALKCAELLLDGVGKGWASRVYFSDNGSTAIEIALKMAFRKFCVDHNFCEATEEEKHIVVKVIALRGSYHGDTLGAMEAQAPSPYTGFLQYPWYTGRGLFLDPPTVFLSNGSWNISLPESFSEIAPEYGTFTSRDEIFDKSRDASTLARIYSAYLSKHLQEHSGVRQSAHVGALIIEPVIHGAGGMHMVDPLFQRVLVNECRNRKIPVIFDEVFTGFWRLGVETTTELLGCKPDIACFAKLLTGGMVPLAVTLATDAVFDSFSGDSKLKALLHGHSYSAHAMGCATAAKAIQWFKDPETNHNITSQGKTLRELWDEELVQQISSHSAVQRVVVIGTLFALELKADASNSGYASLYAKSLLIMLREDGIFTRPLGNVIYLMCGPCTSPEICRRLLTKLYKRLGEFNRT

SEQ ID NO: 53 - protein, 833 aa, Synthetic construct
  source 1..833: note = Arabidopsis thaliana BioDA protein R756S
MIPVTATLIRHRLRHLRHRIRFKSTSVSPFHLPLNHPTYLIWSANTSLGKTLVSTGIAASFLLQQPSSSATKLLYLKPIQTGFPSDSDSRFVFSKLDSLSLRRQIPISISNSVLHSSLPAAKSLGLNVEVSESGMCSLNFRDEKTVTGAPELLCKTLYAWEAAISPHLAAERENATVEDSVVLQMIEKCLKEEMECGVKSEKSDLLCLVETAGGVASPGPSGTLQCDLYRPFRLPGILVGDGRLGGISGTIAAYESLKLRGYDIAAVVFEDHGLVNEVPLTSYLRNKVPVLVLPPVPKDPSDDLIEWFVESDGVFKALKETMVLANLERLERLNGMAKLAGEVFWWPFTQHKLVHQETVTVIDSRCGENFSIYKASDNSSLSQQFDACASWWTQGPDPTFQAELAREMGYTAARFGHVMFPENVYEPALKCAELLLDGVGKGWASRVYFSDNGSTAIEIALKMAFRKFCVDHNFCEATEEEKHIVVKVIALRGSYHGDTLGAMEAQAPSPYTGFLQQPWYTGRGLFLDPPTVFLSNGSWNISLPESFSEIAPEYGTFTSRDEIFDKSRDASTLARIYSAYLSKHLQEHSGVRQSAHVGALIIEPVIHGAGGMHMVDPLFQRVLVNECRNRKIPVIFDEVFTGFWRLGVETTTELLGCKPDIACFAKLLTGGMVPLAVTLATDAVFDSFSGDSKLKALLHGHSYSAHAMGCATAAKAIQWFKDPETNHNITSQGKTLRELWDEELVQQISSHSAVQSVVVIGTLFALELKADASNSGYASLYAKSLLIMLREDGIFTRPLGNVIYLMCGPCTSPEICRRLLTKLYKRLGEFNRT

SEQ ID NO: 54 - protein, 833 aa, Synthetic construct
  source 1..833: note = Arabidopsis thaliana BioDA protein S509C
MIPVTATLIRHRLRHLRHRIRFKSTSVSPFHLPLNHPTYLIWSANTSLGKTLVSTGIAASFLLQQPSSSATKLLYLKPIQTGFPSDSDSRFVFSKLDSLSLRRQIPISISNSVLHSSLPAAKSLGLNVEVSESGMCSLNFRDEKTVTGAPELLCKTLYAWEAAISPHLAAERENATVEDSVVLQMIEKCLKEEMECGVKSEKSDLLCLVETAGGVASPGPSGTLQCDLYRPFRLPGILVGDGRLGGISGTIAAYESLKLRGYDIAAVVFEDHGLVNEVPLTSYLRNKVPVLVLPPVPKDPSDDLIEWFVESDGVFKALKETMVLANLERLERLNGMAKLAGEVFWWPFTQHKLVHQETVTVIDSRCGENFSIYKASDNSSLSQQFDACASWWTQGPDPTFQAELAREMGYTAARFGHVMFPENVYEPALKCAELLLDGVGKGWASRVYFSDNGSTAIEIALKMAFRKFCVDHNFCEATEEEKHIVVKVIALRGSYHGDTLGAMEAQAPCPYTGFLQQPWYTGRGLFLDPPTVFLSNGSWNISLPESFSEIAPEYGTFTSRDEIFDKSRDASTLARIYSAYLSKHLQEHSGVRQSAHVGALIIEPVIHGAGGMHMVDPLFQRVLVNECRNRKIPVIFDEVFTGFWRLGVETTTELLGCKPDIACFAKLLTGGMVPLAVTLATDAVFDSFSGDSKLKALLHGHSYSAHAMGCATAAKAIQWFKDPETNHNITSQGKTLRELWDEELVQQISSHSAVQRVVVIGTLFALELKADASNSGYASLYAKSLLIMLREDGIFTRPLGNVIYLMCGPCTSPEICRRLLTKLYKRLGEFNRT

SEQ ID NO: 55 - protein, 833 aa, Synthetic construct
  source 1..833: note = Arabidopsis thaliana BioDA protein S509D
MIPVTATLIRHRLRHLRHRIRFKSTSVSPFHLPLNHPTYLIWSANTSLGKTLVSTGIAASFLLQQPSSSATKLLYLKPIQTGFPSDSDSRFVFSKLDSLSLRRQIPISISNSVLHSSLPAAKSLGLNVEVSESGMCSLNFRDEKTVTGAPELLCKTLYAWEAAISPHLAAERENATVEDSVVLQMIEKCLKEEMECGVKSEKSDLLCLVETAGGVASPGPSGTLQCDLYRPFRLPGILVGDGRLGGISGTIAAYESLKLRGYDIAAVVFEDHGLVNEVPLTSYLRNKVPVLVLPPVPKDPSDDLIEWFVESDGVFKALKETMVLANLERLERLNGMAKLAGEVFWWPFTQHKLVHQETVTVIDSRCGENFSIYKASDNSSLSQQFDACASWWTQGPDPTFQAELAREMGYTAARFGHVMFPENVYEPALKCAELLLDGVGKGWASRVYFSDNGSTAIEIALKMAFRKFCVDHNFCEATEEEKHIVVKVIALRGSYHGDTLGAMEAQAPDPYTGFLQQPWYTGRGLFLDPPTVFLSNGSWNISLPESFSEIAPEYGTFTSRDEIFDKSRDASTLARIYSAYLSKHLQEHSGVRQSAHVGALIIEPVIHGAGGMHMVDPLFQRVLVNECRNRKIPVIFDEVFTGFWRLGVETTTELLGCKPDIACFAKLLTGGMVPLAVTLATDAVFDSFSGDSKLKALLHGHSYSAHAMGCATAAKAIQWFKDPETNHNITSQGKTLRELWDEELVQQISSHSAVQRVVVIGTLFALELKADASNSGYASLYAKSLLIMLREDGIFTRPLGNVIYLMCGPCTSPEICRRLLTKLYKRLGEFNRT

SEQ ID NO: 56 - protein, 833 aa, Synthetic construct
  source 1..833: note = Arabidopsis thaliana BioDA protein S509E
MIPVTATLIRHRLRHLRHRIRFKSTSVSPFHLPLNHPTYLIWSANTSLGKTLVSTGIAASFLLQQPSSSATKLLYLKPIQTGFPSDSDSRFVFSKLDSLSLRRQIPISISNSVLHSSLPAAKSLGLNVEVSESGMCSLNFRDEKTVTGAPELLCKTLYAWEAAISPHLAAERENATVEDSVVLQMIEKCLKEEMECGVKSEKSDLLCLVETAGGVASPGPSGTLQCDLYRPFRLPGILVGDGRLGGISGTIAAYESLKLRGYDIAAVVFEDHGLVNEVPLTSYLRNKVPVLVLPPVPKDPSDDLIEWFVESDGVFKALKETMVLANLERLERLNGMAKLAGEVFWWPFTQHKLVHQETVTVIDSRCGENFSIYKASDNSSLSQQFDACASWWTQGPDPTFQAELAREMGYTAARFGHVMFPENVYEPALKCAELLLDGVGKGWASRVYFSDNGSTAIEIALKMAFRKFCVDHNFCEATEEEKHIVVKVIALRGSYHGDTLGAMEAQAPEPYTGFLQQPWYTGRGLFLDPPTVFLSNGSWNISLPESFSEIAPEYGTFTSRDEIFDKSRDASTLARIYSAYLSKHLQEHSGVRQSAHVGALIIEPVIHGAGGMHMVDPLFQRVLVNECRNRKIPVIFDEVFTGFWRLGVETTTELLGCKPDIACFAKLLTGGMVPLAVTLATDAVFDSFSGDSKLKALLHGHSYSAHAMGCATAAKAIQWFKDPETNHNITSQGKTLRELWDEELVQQISSHSAVQRVVVIGTLFALELKADASNSGYASLYAKSLLIMLREDGIFTRPLGNVIYLMCGPCTSPEICRRLLTKLYKRLGEFNRT

SEQ ID NO: 57 - protein, 833 aa, Synthetic construct
  source 1..833: note = Arabidopsis thaliana BioDA protein S509G
MIPVTATLIRHRLRHLRHRIRFKSTSVSPFHLPLNHPTYLIWSANTSLGKTLVSTGIAASFLLQQPSSSATKLLYLKPIQTGFPSDSDSRFVFSKLDSLSLRRQIPISISNSVLHSSLPAAKSLGLNVEVSESGMCSLNFRDEKTVTGAPELLCKTLYAWEAAISPHLAAERENATVEDSVVLQMIEKCLKEEMECGVKSEKSDLLCLVETAGGVASPGPSGTLQCDLYRPFRLPGILVGDGRLGGISGTIAAYESLKLRGYDIAAVVFEDHGLVNEVPLTSYLRNKVPVLVLPPVPKDPSDDLIEWFVESDGVFKALKETMVLANLERLERLNGMAKLAGEVFWWPFTQHKLVHQETVTVIDSRCGENFSIYKASDNSSLSQQFDACASWWTQGPDPTFQAELAREMGYTAARFGHVMFPENVYEPALKCAELLLDGVGKGWASRVYFSDNGSTAIEIALKMAFRKFCVDHNFCEATEEEKHIVVKVIALRGSYHGDTLGAMEAQAPGPYTGFLQQPWYTGRGLFLDPPTVFLSNGSWNISLPESFSEIAPEYGTFTSRDEIFDKSRDASTLARIYSAYLSKHLQEHSGVRQSAHVGALIIEPVIHGAGGMHMVDPLFQRVLVNECRNRKIPVIFDEVFTGFWRLGVETTTELLGCKPDIACFAKLLTGGMVPLAVTLATDAVFDSFSGDSKLKALLHGHSYSAHAMGCATAAKAIQWFKDPETNHNITSQGKTLRELWDEELVQQISSHSAVQRVVVIGTLFALELKADASNSGYASLYAKSLLIMLREDGIFTRPLGNVIYLMCGPCTSPEICRRLLTKLYKRLGEFNRT

SEQ ID NO: 58 - protein, 833 aa, Synthetic construct
  source 1..833: note = Arabidopsis thaliana BioDA protein S509V
MIPVTATLIRHRLRHLRHRIRFKSTSVSPFHLPLNHPTYLIWSANTSLGKTLVSTGIAASFLLQQPSSSATKLLYLKPIQTGFPSDSDSRFVFSKLDSLSLRRQIPISISNSVLHSSLPAAKSLGLNVEVSESGMCSLNFRDEKTVTGAPELLCKTLYAWEAAISPHLAAERENATVEDSVVLQMIEKCLKEEMECGVKSEKSDLLCLVETAGGVASPGPSGTLQCDLYRPFRLPGILVGDGRLGGISGTIAAYESLKLRGYDIAAVVFEDHGLVNEVPLTSYLRNKVPVLVLPPVPKDPSDDLIEWFVESDGVFKALKETMVLANLERLERLNGMAKLAGEVFWWPFTQHKLVHQETVTVIDSRCGENFSIYKASDNSSLSQQFDACASWWTQGPDPTFQAELAREMGYTAARFGHVMFPENVYEPALKCAELLLDGVGKGWASRVYFSDNGSTAIEIALKMAFRKFCVDHNFCEATEEEKHIVVKVIALRGSYHGDTLGAMEAQAPVPYTGFLQQPWYTGRGLFLDPPTVFLSNGSWNISLPESFSEIAPEYGTFTSRDEIFDKSRDASTLARIYSAYLSKHLQEHSGVRQSAHVGALIIEPVIHGAGGMHMVDPLFQRVLVNECRNRKIPVIFDEVFTGFWRLGVETTTELLGCKPDIACFAKLLTGGMVPLAVTLATDAVFDSFSGDSKLKALLHGHSYSAHAMGCATAAKAIQWFKDPETNHNITSQGKTLRELWDEELVQQISSHSAVQRVVVIGTLFALELKADASNSGYASLYAKSLLIMLREDGIFTRPLGNVIYLMCGPCTSPEICRRLLTKLYKRLGEFNRT

SEQ ID NO: 59 - protein, 833 aa, Synthetic construct
  source 1..833: note = Arabidopsis thaliana BioDA protein S509W
MIPVTATLIRHRLRHLRHRIRFKSTSVSPFHLPLNHPTYLIWSANTSLGKTLVSTGIAASFLLQQPSSSATKLLYLKPIQTGFPSDSDSRFVFSKLDSLSLRRQIPISISNSVLHSSLPAAKSLGLNVEVSESGMCSLNFRDEKTVTGAPELLCKTLYAWEAAISPHLAAERENATVEDSVVLQMIEKCLKEEMECGVKSEKSDLLCLVETAGGVASPGPSGTLQCDLYRPFRLPGILVGDGRLGGISGTIAAYESLKLRGYDIAAVVFEDHGLVNEVPLTSYLRNKVPVLVLPPVPKDPSDDLIEWFVESDGVFKALKETMVLANLERLERLNGMAKLAGEVFWWPFTQHKLVHQETVTVIDSRCGENFSIYKASDNSSLSQQFDACASWWTQGPDPTFQAELAREMGYTAARFGHVMFPENVYEPALKCAELLLDGVGKGWASRVYFSDNGSTAIEIALKMAFRKFCVDHNFCEATEEEKHIVVKVIALRGSYHGDTLGAMEAQAPWPYTGFLQQPWYTGRGLFLDPPTVFLSNGSWNISLPESFSEIAPEYGTFTSRDEIFDKSRDASTLARIYSAYLSKHLQEHSGVRQSAHVGALIIEPVIHGAGGMHMVDPLFQRVLVNECRNRKIPVIFDEVFTGFWRLGVETTTELLGCKPDIACFAKLLTGGMVPLAVTLATDAVFDSFSGDSKLKALLHGHSYSAHAMGCATAAKAIQWFKDPETNHNITSQGKTLRELWDEELVQQISSHSAVQRVVVIGTLFALELKADASNSGYASLYAKSLLIMLREDGIFTRPLGNVIYLMCGPCTSPEICRRLLTKLYKRLGEFNRT

SEQ ID NO: 60 - protein, 833 aa, Synthetic construct
  source 1..833: note = Arabidopsis thaliana BioDA protein S704H
MIPVTATLIRHRLRHLRHRIRFKSTSVSPFHLPLNHPTYLIWSANTSLGKTLVSTGIAASFLLQQPSSSATKLLYLKPIQTGFPSDSDSRFVFSKLDSLSLRRQIPISISNSVLHSSLPAAKSLGLNVEVSESGMCSLNFRDEKTVTGAPELLCKTLYAWEAAISPHLAAERENATVEDSVVLQMIEKCLKEEMECGVKSEKSDLLCLVETAGGVASPGPSGTLQCDLYRPFRLPGILVGDGRLGGISGTIAAYESLKLRGYDIAAVVFEDHGLVNEVPLTSYLRNKVPVLVLPPVPKDPSDDLIEWFVESDGVFKALKETMVLANLERLERLNGMAKLAGEVFWWPFTQHKLVHQETVTVIDSRCGENFSIYKASDNSSLSQQFDACASWWTQGPDPTFQAELAREMGYTAARFGHVMFPENVYEPALKCAELLLDGVGKGWASRVYFSDNGSTAIEIALKMAFRKFCVDHNFCEATEEEKHIVVKVIALRGSYHGDTLGAMEAQAPSPYTGFLQQPWYTGRGLFLDPPTVFLSNGSWNISLPESFSEIAPEYGTFTSRDEIFDKSRDASTLARIYSAYLSKHLQEHSGVRQSAHVGALIIEPVIHGAGGMHMVDPLFQRVLVNECRNRKIPVIFDEVFTGFWRLGVETTTELLGCKPDIACFAKLLTGGMVPLAVTLATDAVFDSFSGDSKLKALLHGHSYHAHAMGCATAAKAIQWFKDPETNHNITSQGKTLRELWDEELVQQISSHSAVQRVVVIGTLFALELKADASNSGYASLYAKSLLIMLREDGIFTRPLGNVIYLMCGPCTSPEICRRLLTKLYKRLGEFNRT

SEQ ID NO: 61 - protein, 833 aa, Synthetic construct
  source 1..833: note = Arabidopsis thaliana BioDA protein T512C
MIPVTATLIRHRLRHLRHRIRFKSTSVSPFHLPLNHPTYLIWSANTSLGKTLVSTGIAASFLLQQPSSSATKLLYLKPIQTGFPSDSDSRFVFSKLDSLSLRRQIPISISNSVLHSSLPAAKSLGLNVEVSESGMCSLNFRDEKTVTGAPELLCKTLYAWEAAISPHLAAERENATVEDSVVLQMIEKCLKEEMECGVKSEKSDLLCLVETAGGVASPGPSGTLQCDLYRPFRLPGILVGDGRLGGISGTIAAYESLKLRGYDIAAVVFEDHGLVNEVPLTSYLRNKVPVLVLPPVPKDPSDDLIEWFVESDGVFKALKETMVLANLERLERLNGMAKLAGEVFWWPFTQHKLVHQETVTVIDSRCGENFSIYKASDNSSLSQQFDACASWWTQGPDPTFQAELAREMGYTAARFGHVMFPENVYEPALKCAELLLDGVGKGWASRVYFSDNGSTAIEIALKMAFRKFCVDHNFCEATEEEKHIVVKVIALRGSYHGDTLGAMEAQAPSPYCGFLQQPWYTGRGLFLDPPTVFLSNGSWNISLPESFSEIAPEYGTFTSRDEIFDKSRDASTLARIYSAYLSKHLQEHSGVRQSAHVGALIIEPVIHGAGGMHMVDPLFQRVLVNECRNRKIPVIFDEVFTGFWRLGVETTTELLGCKPDIACFAKLLTGGMVPLAVTLATDAVFDSFSGDSKLKALLHGHSYSAHAMGCATAAKAIQWFKDPETNHNITSQGKTLRELWDEELVQQISSHSAVQRVVVIGTLFALELKADASNSGYASLYAKSLLIMLREDGIFTRPLGNVIYLMCGPCTSPEICRRLLTKLYKRLGEFNRT

SEQ ID NO: 62 - protein, 833 aa, Synthetic construct
  source 1..833: note = Arabidopsis thaliana BioDA protein T512D
MIPVTATLIRHRLRHLRHRIRFKSTSVSPFHLPLNHPTYLIWSANTSLGKTLVSTGIAASFLLQQPSSSATKLLYLKPIQTGFPSDSDSRFVFSKLDSLSLRRQIPISISNSVLHSSLPAAKSLGLNVEVSESGMCSLNFRDEKTVTGAPELLCKTLYAWEAAISPHLAAERENATVEDSVVLQMIEKCLKEEMECGVKSEKSDLLCLVETAGGVASPGPSGTLQCDLYRPFRLPGILVGDGRLGGISGTIAAYESLKLRGYDIAAVVFEDHGLVNEVPLTSYLRNKVPVLVLPPVPKDPSDDLIEWFVESDGVFKALKETMVLANLERLERLNGMAKLAGEVFWWPFTQHKLVHQETVTVIDSRCGENFSIYKASDNSSLSQQFDACASWWTQGPDPTFQAELAREMGYTAARFGHVMFPENVYEPALKCAELLLDGVGKGWASRVYFSDNGSTAIEIALKMAFRKFCVDHNFCEATEEEKHIVVKVIALRGSYHGDTLGAMEAQAPSPYDGFLQQPWYTGRGLFLDPPTVFLSNGSWNISLPESFSEIAPEYGTFTSRDEIFDKSRDASTLARIYSAYLSKHLQEHSGVRQSAHVGALIIEPVIHGAGGMHMVDPLFQRVLVNECRNRKIPVIFDEVFTGFWRLGVETTTELLGCKPDIACFAKLLTGGMVPLAVTLATDAVFDSFSGDSKLKALLHGHSYSAHAMGCATAAKAIQWFKDPETNHNITSQGKTLRELWDEELVQQISSHSAVQRVVVIGTLFALELKADASNSGYASLYAKSLLIMLREDGIFTRPLGNVIYLMCGPCTSPEICRRLLTKLYKRLGEFNRT

SEQ ID NO: 63 - protein, 833 aa, Synthetic construct
  source 1..833: note = Arabidopsis thaliana BioDA protein T512Q
MIPVTATLIRHRLRHLRHRIRFKSTSVSPFHLPLNHPTYLIWSANTSLGKTLVSTGIAASFLLQQPSSSATKLLYLKPIQTGFPSDSDSRFVFSKLDSLSLRRQIPISISNSVLHSSLPAAKSLGLNVEVSESGMCSLNFRDEKTVTGAPELLCKTLYAWEAAISPHLAAERENATVEDSVVLQMIEKCLKEEMECGVKSEKSDLLCLVETAGGVASPGPSGTLQCDLYRPFRLPGILVGDGRLGGISGTIAAYESLKLRGYDIAAVVFEDHGLVNEVPLTSYLRNKVPVLVLPPVPKDPSDDLIEWFVESDGVFKALKETMVLANLERLERLNGMAKLAGEVFWWPFTQHKLVHQETVTVIDSRCGENFSIYKASDNSSLSQQFDACASWWTQGPDPTFQAELAREMGYTAARFGHVMFPENVYEPALKCAELLLDGVGKGWASRVYFSDNGSTAIEIALKMAFRKFCVDHNFCEATEEEKHIVVKVIALRGSYHGDTLGAMEAQAPSPYQGFLQQPWYTGRGLFLDPPTVFLSNGSWNISLPESFSEIAPEYGTFTSRDEIFDKSRDASTLARIYSAYLSKHLQEHSGVRQSAHVGALIIEPVIHGAGGMHMVDPLFQRVLVNECRNRKIPVIFDEVFTGFWRLGVETTTELLGCKPDIACFAKLLTGGMVPLAVTLATDAVFDSFSGDSKLKALLHGHSYSAHAMGCATAAKAIQWFKDPETNHNITSQGKTLRELWDEELVQQISSHSAVQRVVVIGTLFALELKADASNSGYASLYAKSLLIMLREDGIFTRPLGNVIYLMCGPCTSPEICRRLLTKLYKRLGEFNRT

SEQ ID NO: 64 - protein, 833 aa, Synthetic construct
  source 1..833: note = Arabidopsis thaliana BioDA protein T512R
MIPVTATLIRHRLRHLRHRIRFKSTSVSPFHLPLNHPTYLIWSANTSLGKTLVSTGIAASFLLQQPSSSATKLLYLKPIQTGFPSDSDSRFVFSKLDSLSLRRQIPISISNSVLHSSLPAAKSLGLNVEVSESGMCSLNFRDEKTVTGAPELLCKTLYAWEAAISPHLAAERENATVEDSVVLQMIEKCLKEEMECGVKSEKSDLLCLVETAGGVASPGPSGTLQCDLYRPFRLPGILVGDGRLGGISGTIAAYESLKLRGYDIAAVVFEDHGLVNEVPLTSYLRNKVPVLVLPPVPKDPSDDLIEWFVESDGVFKALKETMVLANLERLERLNGMAKLAGEVFWWPFTQHKLVHQETVTVIDSRCGENFSIYKASDNSSLSQQFDACASWWTQGPDPTFQAELAREMGYTAARFGHVMFPENVYEPALKCAELLLDGVGKGWASRVYFSDNGSTAIEIALKMAFRKFCVDHNFCEATEEEKHIVVKVIALRGSYHGDTLGAMEAQAPSPYRGFLQQPWYTGRGLFLDPPTVFLSNGSWNISLPESFSEIAPEYGTFTSRDEIFDKSRDASTLARIYSAYLSKHLQEHSGVRQSAHVGALIIEPVIHGAGGMHMVDPLFQRVLVNECRNRKIPVIFDEVFTGFWRLGVETTTELLGCKPDIACFAKLLTGGMVPLAVTLATDAVFDSFSGDSKLKALLHGHSYSAHAMGCATAAKAIQWFKDPETNHNITSQGKTLRELWDEELVQQISSHSAVQRVVVIGTLFALELKADASNSGYASLYAKSLLIMLREDGIFTRPLGNVIYLMCGPCTSPEICRRLLTKLYKRLGEFNRT

SEQ ID NO: 65 - protein, 833 aa, Synthetic construct
  source 1..833: note = Arabidopsis thaliana BioDA protein T512V
MIPVTATLIRHRLRHLRHRIRFKSTSVSPFHLPLNHPTYLIWSANTSLGKTLVSTGIAASFLLQQPSSSATKLLYLKPIQTGFPSDSDSRFVFSKLDSLSLRRQIPISISNSVLHSSLPAAKSLGLNVEVSESGMCSLNFRDEKTVTGAPELLCKTLYAWEAAISPHLAAERENATVEDSVVLQMIEKCLKEEMECGVKSEKSDLLCLVETAGGVASPGPSGTLQCDLYRPFRLPGILVGDGRLGGISGTIAAYESLKLRGYDIAAVVFEDHGLVNEVPLTSYLRNKVPVLVLPPVPKDPSDDLIEWFVESDGVFKALKETMVLANLERLERLNGMAKLAGEVFWWPFTQHKLVHQETVTVIDSRCGENFSIYKASDNSSLSQQFDACASWWTQGPDPTFQAELAREMGYTAARFGHVMFPENVYEPALKCAELLLDGVGKGWASRVYFSDNGSTAIEIALKMAFRKFCVDHNFCEATEEEKHIVVKVIALRGSYHGDTLGAMEAQAPSPYVGFLQQPWYTGRGLFLDPPTVFLSNGSWNISLPESFSEIAPEYGTFTSRDEIFDKSRDASTLARIYSAYLSKHLQEHSGVRQSAHVGALIIEPVIHGAGGMHMVDPLFQRVLVNECRNRKIPVIFDEVFTGFWRLGVETTTELLGCKPDIACFAKLLTGGMVPLAVTLATDAVFDSFSGDSKLKALLHGHSYSAHAMGCATAAKAIQWFKDPETNHNITSQGKTLRELWDEELVQQISSHSAVQRVVVIGTLFALELKADASNSGYASLYAKSLLIMLREDGIFTRPLGNVIYLMCGPCTSPEICRRLLTKLYKRLGEFNRT

SEQ ID NO: 66 - protein, 833 aa, Synthetic construct
  source 1..833: note = Arabidopsis thaliana BioDA protein W391L
MIPVTATLIRHRLRHLRHRIRFKSTSVSPFHLPLNHPTYLIWSANTSLGKTLVSTGIAASFLLQQPSSSATKLLYLKPIQTGFPSDSDSRFVFSKLDSLSLRRQIPISISNSVLHSSLPAAKSLGLNVEVSESGMCSLNFRDEKTVTGAPELLCKTLYAWEAAISPHLAAERENATVEDSVVLQMIEKCLKEEMECGVKSEKSDLLCLVETAGGVASPGPSGTLQCDLYRPFRLPGILVGDGRLGGISGTIAAYESLKLRGYDIAAVVFEDHGLVNEVPLTSYLRNKVPVLVLPPVPKDPSDDLIEWFVESDGVFKALKETMVLANLERLERLNGMAKLAGEVFWWPFTQHKLVHQETVTVIDSRCGENFSIYKASDNSSLSQQFDACASLWTQGPDPTFQAELAREMGYTAARFGHVMFPENVYEPALKCAELLLDGVGKGWASRVYFSDNGSTAIEIALKMAFRKFCVDHNFCEATEEEKHIVVKVIALRGSYHGDTLGAMEAQAPSPYTGFLQQPWYTGRGLFLDPPTVFLSNGSWNISLPESFSEIAPEYGTFTSRDEIFDKSRDASTLARIYSAYLSKHLQEHSGVRQSAHVGALIIEPVIHGAGGMHMVDPLFQRVLVNECRNRKIPVIFDEVFTGFWRLGVETTTELLGCKPDIACFAKLLTGGMVPLAVTLATDAVFDSFSGDSKLKALLHGHSYSAHAMGCATAAKAIQWFKDPETNHNITSQGKTLRELWDEELVQQISSHSAVQRVVVIGTLFALELKADASNSGYASLYAKSLLIMLREDGIFTRPLGNVIYLMCGPCTSPEICRRLLTKLYKRLGEFNRT

SEQ ID NO: 67 - protein, 833 aa, Synthetic construct
  source 1..833: note = Arabidopsis thaliana BioDA protein W391M
MIPVTATLIRHRLRHLRHRIRFKSTSVSPFHLPLNHPTYLIWSANTSLGKTLVSTGIAASFLLQQPSSSATKLLYLKPIQTGFPSDSDSRFVFSKLDSLSLRRQIPISISNSVLHSSLPAAKSLGLNVEVSESGMCSLNFRDEKTVTGAPELLCKTLYAWEAAISPHLAAERENATVEDSVVLQMIEKCLKEEMECGVKSEKSDLLCLVETAGGVASPGPSGTLQCDLYRPFRLPGILVGDGRLGGISGTIAAYESLKLRGYDIAAVVFEDHGLVNEVPLTSYLRNKVPVLVLPPVPKDPSDDLIEWFVESDGVFKALKETMVLANLERLERLNGMAKLAGEVFWWPFTQHKLVHQETVTVIDSRCGENFSIYKASDNSSLSQQFDACASMWTQGPDPTFQAELAREMGYTAARFGHVMFPENVYEPALKCAELLLDGVGKGWASRVYFSDNGSTAIEIALKMAFRKFCVDHNFCEATEEEKHIVVKVIALRGSYHGDTLGAMEAQAPSPYTGFLQQPWYTGRGLFLDPPTVFLSNGSWNISLPESFSEIAPEYGTFTSRDEIFDKSRDASTLARIYSAYLSKHLQEHSGVRQSAHVGALIIEPVIHGAGGMHMVDPLFQRVLVNECRNRKIPVIFDEVFTGFWRLGVETTTELLGCKPDIACFAKLLTGGMVPLAVTLATDAVFDSFSGDSKLKALLHGHSYSAHAMGCATAAKAIQWFKDPETNHNITSQGKTLRELWDEELVQQISSHSAVQRVVVIGTLFALELKADASNSGYASLYAKSLLIMLREDGIFTRPLGNVIYLMCGPCTSPEICRRLLTKLYKRLGEFNRT

SEQ ID NO: 68 - protein, 833 aa, Synthetic construct
  source 1..833: note = Arabidopsis thaliana BioDA protein W392A
MIPVTATLIRHRLRHLRHRIRFKSTSVSPFHLPLNHPTYLIWSANTSLGKTLVSTGIAASFLLQQPSSSATKLLYLKPIQTGFPSDSDSRFVFSKLDSLSLRRQIPISISNSVLHSSLPAAKSLGLNVEVSESGMCSLNFRDEKTVTGAPELLCKTLYAWEAAISPHLAAERENATVEDSVVLQMIEKCLKEEMECGVKSEKSDLLCLVETAGGVASPGPSGTLQCDLYRPFRLPGILVGDGRLGGISGTIAAYESLKLRGYDIAAVVFEDHGLVNEVPLTSYLRNKVPVLVLPPVPKDPSDDLIEWFVESDGVFKALKETMVLANLERLERLNGMAKLAGEVFWWPFTQHKLVHQETVTVIDSRCGENFSIYKASDNSSLSQQFDACASWATQGPDPTFQAELAREMGYTAARFGHVMFPENVYEPALKCAELLLDGVGKGWASRVYFSDNGSTAIEIALKMAFRKFCVDHNFCEATEEEKHIVVKVIALRGSYHGDTLGAMEAQAPSPYTGFLQQPWYTGRGLFLDPPTVFLSNGSWNISLPESFSEIAPEYGTFTSRDEIFDKSRDASTLARIYSAYLSKHLQEHSGVRQSAHVGALIIEPVIHGAGGMHMVDPLFQRVLVNECRNRKIPVIFDEVFTGFWRLGVETTTELLGCKPDIACFAKLLTGGMVPLAVTLATDAVFDSFSGDSKLKALLHGHSYSAHAMGCATAAKAIQWFKDPETNHNITSQGKTLRELWDEELVQQISSHSAVQRVVVIGTLFALELKADASNSGYASLYAKSLLIMLREDGIFTRPLGNVIYLMCGPCTSPEICRRLLTKLYKRLGEFNRT

SEQ ID NO: 69 - protein, 833 aa, Synthetic construct
  source 1..833: note = Arabidopsis thaliana BioDA protein W392G
MIPVTATLIRHRLRHLRHRIRFKSTSVSPFHLPLNHPTYLIWSANTSLGKTLVSTGIAASFLLQQPSSSATKLLYLKPIQTGFPSDSDSRFVFSKLDSLSLRRQIPISISNSVLHSSLPAAKSLGLNVEVSESGMCSLNFRDEKTVTGAPELLCKTLYAWEAAISPHLAAERENATVEDSVVLQMIEKCLKEEMECGVKSEKSDLLCLVETAGGVASPGPSGTLQCDLYRPFRLPGILVGDGRLGGISGTIAAYESLKLRGYDIAAVVFEDHGLVNEVPLTSYLRNKVPVLVLPPVPKDPSDDLIEWFVESDGVFKALKETMVLANLERLERLNGMAKLAGEVFWWPFTQHKLVHQETVTVIDSRCGENFSIYKASDNSSLSQQFDACASWGTQGPDPTFQAELAREMGYTAARFGHVMFPENVYEPALKCAELLLDGVGKGWASRVYFSDNGSTAIEIALKMAFRKFCVDHNFCEATEEEKHIVVKVIALRGSYHGDTLGAMEAQAPSPYTGFLQQPWYTGRGLFLDPPTVFLSNGSWNISLPESFSEIAPEYGTFTSRDEIFDKSRDASTLARIYSAYLSKHLQEHSGVRQSAHVGALIIEPVIHGAGGMHMVDPLFQRVLVNECRNRKIPVIFDEVFTGFWRLGVETTTELLGCKPDIACFAKLLTGGMVPLAVTLATDAVFDSFSGDSKLKALLHGHSYSAHAMGCATAAKAIQWFKDPETNHNITSQGKTLRELWDEELVQQISSHSAVQRVVVIGTLFALELKADASNSGYASLYAKSLLIMLREDGIFTRPLGNVIYLMCGPCTSPEICRRLLTKLYKRLGEFNRT

SEQ ID NO: 70 - protein, 833 aa, Synthetic construct
  source 1..833: note = Arabidopsis thaliana BioDA protein W392S
MIPVTATLIRHRLRHLRHRIRFKSTSVSPFHLPLNHPTYLIWSANTSLGKTLVSTGIAASFLLQQPSSSATKLLYLKPIQTGFPSDSDSRFVFSKLDSLSLRRQIPISISNSVLHSSLPAAKSLGLNVEVSESGMCSLNFRDEKTVTGAPELLCKTLYAWEAAISPHLAAERENATVEDSVVLQMIEKCLKEEMECGVKSEKSDLLCLVETAGGVASPGPSGTLQCDLYRPFRLPGILVGDGRLGGISGTIAAYESLKLRGYDIAAVVFEDHGLVNEVPLTSYLRNKVPVLVLPPVPKDPSDDLIEWFVESDGVFKALKETMVLANLERLERLNGMAKLAGEVFWWPFTQHKLVHQETVTVIDSRCGENFSIYKASDNSSLSQQFDACASWSTQGPDPTFQAELAREMGYTAARFGHVMFPENVYEPALKCAELLLDGVGKGWASRVYFSDNGSTAIEIALKMAFRKFCVDHNFCEATEEEKHIVVKVIALRGSYHGDTLGAMEAQAPSPYTGFLQQPWYTGRGLFLDPPTVFLSNGSWNISLPESFSEIAPEYGTFTSRDEIFDKSRDASTLARIYSAYLSKHLQEHSGVRQSAHVGALIIEPVIHGAGGMHMVDPLFQRVLVNECRNRKIPVIFDEVFTGFWRLGVETTTELLGCKPDIACFAKLLTGGMVPLAVTLATDAVFDSFSGDSKLKALLHGHSYSAHAMGCATAAKAIQWFKDPETNHNITSQGKTLRELWDEELVQQISSHSAVQRVVVIGTLFALELKADASNSGYASLYAKSLLIMLREDGIFTRPLGNVIYLMCGPCTSPEICRRLLTKLYKRLGEFNRT

SEQ ID NO: 71 - protein, 833 aa, Synthetic construct
  source 1..833: note = Arabidopsis thaliana BioDA protein Y511D
MIPVTATLIRHRLRHLRHRIRFKSTSVSPFHLPLNHPTYLIWSANTSLGKTLVSTGIAASFLLQQPSSSATKLLYLKPIQTGFPSDSDSRFVFSKLDSLSLRRQIPISISNSVLHSSLPAAKSLGLNVEVSESGMCSLNFRDEKTVTGAPELLCKTLYAWEAAISPHLAAERENATVEDSVVLQMIEKCLKEEMECGVKSEKSDLLCLVETAGGVASPGPSGTLQCDLYRPFRLPGILVGDGRLGGISGTIAAYESLKLRGYDIAAVVFEDHGLVNEVPLTSYLRNKVPVLVLPPVPKDPSDDLIEWFVESDGVFKALKETMVLANLERLERLNGMAKLAGEVFWWPFTQHKLVHQETVTVIDSRCGENFSIYKASDNSSLSQQFDACASWWTQGPDPTFQAELAREMGYTAARFGHVMFPENVYEPALKCAELLLDGVGKGWASRVYFSDNGSTAIEIALKMAFRKFCVDHNFCEATEEEKHIVVKVIALRGSYHGDTLGAMEAQAPSPDTGFLQQPWYTGRGLFLDPPTVFLSNGSWNISLPESFSEIAPEYGTFTSRDEIFDKSRDASTLARIYSAYLSKHLQEHSGVRQSAHVGALIIEPVIHGAGGMHMVDPLFQRVLVNECRNRKIPVIFDEVFTGFWRLGVETTTELLGCKPDIACFAKLLTGGMVPLAVTLATDAVFDSFSGDSKLKALLHGHSYSAHAMGCATAAKAIQWFKDPETNHNITSQGKTLRELWDEELVQQISSHSAVQRVVVIGTLFALELKADASNSGYASLYAKSLLIMLREDGIFTRPLGNVIYLMCGPCTSPEICRRLLTKLYKRLGEFNRT

SEQ ID NO: 72 - protein, 833 aa, Synthetic construct
  source 1..833: note = Arabidopsis thaliana BioDA protein Y511E
MIPVTATLIRHRLRHLRHRIRFKSTSVSPFHLPLNHPTYLIWSANTSLGKTLVSTGIAASFLLQQPSSSATKLLYLKPIQTGFPSDSDSRFVFSKLDSLSLRRQIPISISNSVLHSSLPAAKSLGLNVEVSESGMCSLNFRDEKTVTGAPELLCKTLYAWEAAISPHLAAERENATVEDSVVLQMIEKCLKEEMECGVKSEKSDLLCLVETAGGVASPGPSGTLQCDLYRPFRLPGILVGDGRLGGISGTIAAYESLKLRGYDIAAVVFEDHGLVNEVPLTSYLRNKVPVLVLPPVPKDPSDDLIEWFVESDGVFKALKETMVLANLERLERLNGMAKLAGEVFWWPFTQHKLVHQETVTVIDSRCGENFSIYKASDNSSLSQQFDACASWWTQGPDPTFQAELAREMGYTAARFGHVMFPENVYEPALKCAELLLDGVGKGWASRVYFSDNGSTAIEIALKMAFRKFCVDHNFCEATEEEKHIVVKVIALRGSYHGDTLGAMEAQAPSPETGFLQQPWYTGRGLFLDPPTVFLSNGSWNISLPESFSEIAPEYGTFTSRDEIFDKSRDASTLARIYSAYLSKHLQEHSGVRQSAHVGALIIEPVIHGAGGMHMVDPLFQRVLVNECRNRKIPVIFDEVFTGFWRLGVETTTELLGCKPDIACFAKLLTGGMVPLAVTLATDAVFDSFSGDSKLKALLHGHSYSAHAMGCATAAKAIQWFKDPETNHNITSQGKTLRELWDEELVQQISSHSAVQRVVVIGTLFALELKADASNSGYASLYAKSLLIMLREDGIFTRPLGNVIYLMCGPCTSPEICRRLLTKLYKRLGEFNRT

SEQ ID NO: 73 - protein, 833 aa, Synthetic construct
  source 1..833: note = Arabidopsis thaliana BioDA protein Y511F
MIPVTATLIRHRLRHLRHRIRFKSTSVSPFHLPLNHPTYLIWSANTSLGKTLVSTGIAASFLLQQPSSSATKLLYLKPIQTGFPSDSDSRFVFSKLDSLSLRRQIPISISNSVLHSSLPAAKSLGLNVEVSESGMCSLNFRDEKTVTGAPELLCKTLYAWEAAISPHLAAERENATVEDSVVLQMIEKCLKEEMECGVKSEKSDLLCLVETAGGVASPGPSGTLQCDLYRPFRLPGILVGDGRLGGISGTIAAYESLKLRGYDIAAVVFEDHGLVNEVPLTSYLRNKVPVLVLPPVPKDPSDDLIEWFVESDGVFKALKETMVLANLERLERLNGMAKLAGEVFWWPFTQHKLVHQETVTVIDSRCGENFSIYKASDNSSLSQQFDACASWWTQGPDPTFQAELAREMGYTAARFGHVMFPENVYEPALKCAELLLDGVGKGWASRVYFSDNGSTAIEIALKMAFRKFCVDHNFCEATEEEKHIVVKVIALRGSYHGDTLGAMEAQAPSPFTGFLQQPWYTGRGLFLDPPTVFLSNGSWNISLPESFSEIAPEYGTFTSRDEIFDKSRDASTLARIYSAYLSKHLQEHSGVRQSAHVGALIIEPVIHGAGGMHMVDPLFQRVLVNECRNRKIPVIFDEVFTGFWRLGVETTTELLGCKPDIACFAKLLTGGMVPLAVTLATDAVFDSFSGDSKLKALLHGHSYSAHAMGCATAAKAIQWFKDPETNHNITSQGKTLRELWDEELVQQISSHSAVQRVVVIGTLFALELKADASNSGYASLYAKSLLIMLREDGIFTRPLGNVIYLMCGPCTSPEICRRLLTKLYKRLGEFNRT

SEQ ID NO: 74 - protein, 833 aa, Synthetic construct
  source 1..833: note = Arabidopsis thaliana BioDA protein Y511M
MIPVTATLIRHRLRHLRHRIRFKSTSVSPFHLPLNHPTYLIWSANTSLGKTLVSTGIAASFLLQQPSSSATKLLYLKPIQTGFPSDSDSRFVFSKLDSLSLRRQIPISISNSVLHSSLPAAKSLGLNVEVSESGMCSLNFRDEKTVTGAPELLCKTLYAWEAAISPHLAAERENATVEDSVVLQMIEKCLKEEMECGVKSEKSDLLCLVETAGGVASPGPSGTLQCDLYRPFRLPGILVGDGRLGGISGTIAAYESLKLRGYDIAAVVFEDHGLVNEVPLTSYLRNKVPVLVLPPVPKDPSDDLIEWFVESDGVFKALKETMVLANLERLERLNGMAKLAGEVFWWPFTQHKLVHQETVTVIDSRCGENFSIYKASDNSSLSQQFDACASWWTQGPDPTFQAELAREMGYTAARFGHVMFPENVYEPALKCAELLLDGVGKGWASRVYFSDNGSTAIEIALKMAFRKFCVDHNFCEATEEEKHIVVKVIALRGSYHGDTLGAMEAQAPSPMTGFLQQPWYTGRGLFLDPPTVFLSNGSWNISLPESFSEIAPEYGTFTSRDEIFDKSRDASTLARIYSAYLSKHLQEHSGVRQSAHVGALIIEPVIHGAGGMHMVDPLFQRVLVNECRNRKIPVIFDEVFTGFWRLGVETTTELLGCKPDIACFAKLLTGGMVPLAVTLATDAVFDSFSGDSKLKALLHGHSYSAHAMGCATAAKAIQWFKDPETNHNITSQGKTLRELWDEELVQQISSHSAVQRVVVIGTLFALELKADASNSGYASLYAKSLLIMLREDGIFTRPLGNVIYLMCGPCTSPEICRRLLTKLYKRLGEFNRT

SEQ ID NO: 75 - protein, 833 aa, Synthetic construct
  source 1..833: note = Arabidopsis thaliana BioDA protein Y511P
MIPVTATLIRHRLRHLRHRIRFKSTSVSPFHLPLNHPTYLIWSANTSLGKTLVSTGIAASFLLQQPSSSATKLLYLKPIQTGFPSDSDSRFVFSKLDSLSLRRQIPISISNSVLHSSLPAAKSLGLNVEVSESGMCSLNFRDEKTVTGAPELLCKTLYAWEAAISPHLAAERENATVEDSVVLQMIEKCLKEEMECGVKSEKSDLLCLVETAGGVASPGPSGTLQCDLYRPFRLPGILVGDGRLGGISGTIAAYESLKLRGYDIAAVVFEDHGLVNEVPLTSYLRNKVPVLVLPPVPKDPSDDLIEWFVESDGVFKALKETMVLANLERLERLNGMAKLAGEVFWWPFTQHKLVHQETVTVIDSRCGENFSIYKASDNSSLSQQFDACASWWTQGPDPTFQAELAREMGYTAARFGHVMFPENVYEPALKCAELLLDGVGKGWASRVYFSDNGSTAIEIALKMAFRKFCVDHNFCEATEEEKHIVVKVIALRGSYHGDTLGAMEAQAPSPPTGFLQQPWYTGRGLFLDPPTVFLSNGSWNISLPESFSEIAPEYGTFTSRDEIFDKSRDASTLARIYSAYLSKHLQEHSGVRQSAHVGALIIEPVIHGAGGMHMVDPLFQRVLVNECRNRKIPVIFDEVFTGFWRLGVETTTELLGCKPDIACFAKLLTGGMVPLAVTLATDAVFDSFSGDSKLKALLHGHSYSAHAMGCATAAKAIQWFKDPETNHNITSQGKTLRELWDEELVQQISSHSAVQRVVVIGTLFALELKADASNSGYASLYAKSLLIMLREDGIFTRPLGNVIYLMCGPCTSPEICRRLLTKLYKRLGEFNRT

SEQ ID NO: 76 - protein, 833 aa, Synthetic construct
  source 1..833: note = Arabidopsis thaliana BioDA protein Y511R
MIPVTATLIRHRLRHLRHRIRFKSTSVSPFHLPLNHPTYLIWSANTSLGKTLVSTGIAASFLLQQPSSSATKLLYLKPIQTGFPSDSDSRFVFSKLDSLSLRRQIPISISNSVLHSSLPAAKSLGLNVEVSESGMCSLNFRDEKTVTGAPELLCKTLYAWEAAISPHLAAERENATVEDSVVLQMIEKCLKEEMECGVKSEKSDLLCLVETAGGVASPGPSGTLQCDLYRPFRLPGILVGDGRLGGISGTIAAYESLKLRGYDIAAVVFEDHGLVNEVPLTSYLRNKVPVLVLPPVPKDPSDDLIEWFVESDGVFKALKETMVLANLERLERLNGMAKLAGEVFWWPFTQHKLVHQETVTVIDSRCGENFSIYKASDNSSLSQQFDACASWWTQGPDPTFQAELAREMGYTAARFGHVMFPENVYEPALKCAELLLDGVGKGWASRVYFSDNGSTAIEIALKMAFRKFCVDHNFCEATEEEKHIVVKVIALRGSYHGDTLGAMEAQAPSPRTGFLQQPWYTGRGLFLDPPTVFLSNGSWNISLPESFSEIAPEYGTFTSRDEIFDKSRDASTLARIYSAYLSKHLQEHSGVRQSAHVGALIIEPVIHGAGGMHMVDPLFQRVLVNECRNRKIPVIFDEVFTGFWRLGVETTTELLGCKPDIACFAKLLTGGMVPLAVTLATDAVFDSFSGDSKLKALLHGHSYSAHAMGCATAAKAIQWFKDPETNHNITSQGKTLRELWDEELVQQISSHSAVQRVVVIGTLFALELKADASNSGYASLYAKSLLIMLREDGIFTRPLGNVIYLMCGPCTSPEICRRLLTKLYKRLGEFNRT

SEQ ID NO: 77 - protein, 833 aa, Synthetic construct
  source 1..833: note = Arabidopsis thaliana BioDA protein Y511V
MIPVTATLIRHRLRHLRHRIRFKSTSVSPFHLPLNHPTYLIWSANTSLGKTLVSTGIAASFLLQQPSSSATKLLYLKPIQTGFPSDSDSRFVFSKLDSLSLRRQIPISISNSVLHSSLPAAKSLGLNVEVSESGMCSLNFRDEKTVTGAPELLCKTLYAWEAAISPHLAAERENATVEDSVVLQMIEKCLKEEMECGVKSEKSDLLCLVETAGGVASPGPSGTLQCDLYRPFRLPGILVGDGRLGGISGTIAAYESLKLRGYDIAAVVFEDHGLVNEVPLTSYLRNKVPVLVLPPVPKDPSDDLIEWFVESDGVFKALKETMVLANLERLERLNGMAKLAGEVFWWPFTQHKLVHQETVTVIDSRCGENFSIYKASDNSSLSQQFDACASWWTQGPDPTFQAELAREMGYTAARFGHVMFPENVYEPALKCAELLLDGVGKGWASRVYFSDNGSTAIEIALKMAFRKFCVDHNFCEATEEEKHIVVKVIALRGSYHGDTLGAMEAQAPSPVTGFLQQPWYTGRGLFLDPPTVFLSNGSWNISLPESFSEIAPEYGTFTSRDEIFDKSRDASTLARIYSAYLSKHLQEHSGVRQSAHVGALIIEPVIHGAGGMHMVDPLFQRVLVNECRNRKIPVIFDEVFTGFWRLGVETTTELLGCKPDIACFAKLLTGGMVPLAVTLATDAVFDSFSGDSKLKALLHGHSYSAHAMGCATAAKAIQWFKDPETNHNITSQGKTLRELWDEELVQQISSHSAVQRVVVIGTLFALELKADASNSGYASLYAKSLLIMLREDGIFTRPLGNVIYLMCGPCTSPEICRRLLTKLYKRLGEFNRT

SEQ ID NO: 78 - protein, 833 aa, Synthetic construct
  source 1..833: note = Arabidopsis thaliana BioDA protein Y511W
MIPVTATLIRHRLRHLRHRIRFKSTSVSPFHLPLNHPTYLIWSANTSLGKTLVSTGIAASFLLQQPSSSATKLLYLKPIQTGFPSDSDSRFVFSKLDSLSLRRQIPISISNSVLHSSLPAAKSLGLNVEVSESGMCSLNFRDEKTVTGAPELLCKTLYAWEAAISPHLAAERENATVEDSVVLQMIEKCLKEEMECGVKSEKSDLLCLVETAGGVASPGPSGTLQCDLYRPFRLPGILVGDGRLGGISGTIAAYESLKLRGYDIAAVVFEDHGLVNEVPLTSYLRNKVPVLVLPPVPKDPSDDLIEWFVESDGVFKALKETMVLANLERLERLNGMAKLAGEVFWWPFTQHKLVHQETVTVIDSRCGENFSIYKASDNSSLSQQFDACASWWTQGPDPTFQAELAREMGYTAARFGHVMFPENVYEPALKCAELLLDGVGKGWASRVYFSDNGSTAIEIALKMAFRKFCVDHNFCEATEEEKHIVVKVIALRGSYHGDTLGAMEAQAPSPWTGFLQQPWYTGRGLFLDPPTVFLSNGSWNISLPESFSEIAPEYGTFTSRDEIFDKSRDASTLARIYSAYLSKHLQEHSGVRQSAHVGALIIEPVIHGAGGMHMVDPLFQRVLVNECRNRKIPVIFDEVFTGFWRLGVETTTELLGCKPDIACFAKLLTGGMVPLAVTLATDAVFDSFSGDSKLKALLHGHSYSAHAMGCATAAKAIQWFKDPETNHNITSQGKTLRELWDEELVQQISSHSAVQRVVVIGTLFALELKADASNSGYASLYAKSLLIMLREDGIFTRPLGNVIYLMCGPCTSPEICRRLLTKLYKRLGEFNRT

SEQ ID NO: 79 - protein, 833 aa, Synthetic construct
  source 1..833: note = Arabidopsis thaliana BioDA protein A389F
MIPVTATLIRHRLRHLRHRIRFKSTSVSPFHLPLNHPTYLIWSANTSLGKTLVSTGIAASFLLQQPSSSATKLLYLKPIQTGFPSDSDSRFVFSKLDSLSLRRQIPISISNSVLHSSLPAAKSLGLNVEVSESGMCSLNFRDEKTVTGAPELLCKTLYAWEAAISPHLAAERENATVEDSVVLQMIEKCLKEEMECGVKSEKSDLLCLVETAGGVASPGPSGTLQCDLYRPFRLPGILVGDGRLGGISGTIAAYESLKLRGYDIAAVVFEDHGLVNEVPLTSYLRNKVPVLVLPPVPKDPSDDLIEWFVESDGVFKALKETMVLANLERLERLNGMAKLAGEVFWWPFTQHKLVHQETVTVIDSRCGENFSIYKASDNSSLSQQFDACFSWWTQGPDPTFQAELAREMGYTAARFGHVMFPENVYEPALKCAELLLDGVGKGWASRVYFSDNGSTAIEIALKMAFRKFCVDHNFCEATEEEKHIVVKVIALRGSYHGDTLGAMEAQAPSPYTGFLQQPWYTGRGLFLDPPTVFLSNGSWNISLPESFSEIAPEYGTFTSRDEIFDKSRDASTLARIYSAYLSKHLQEHSGVRQSAHVGALIIEPVIHGAGGMHMVDPLFQRVLVNECRNRKIPVIFDEVFTGFWRLGVETTTELLGCKPDIACFAKLLTGGMVPLAVTLATDAVFDSFSGDSKLKALLHGHSYSAHAMGCATAAKAIQWFKDPETNHNITSQGKTLRELWDEELVQQISSHSAVQRVVVIGTLFALELKADASNSGYASLYAKSLLIMLREDGIFTRPLGNVIYLMCGPCTSPEICRRLLTKLYKRLGEFNRT

SEQ ID NO: 80 - protein, 833 aa, Synthetic construct
  source 1..833: note = Arabidopsis thaliana BioDA protein A609K
MIPVTATLIRHRLRHLRHRIRFKSTSVSPFHLPLNHPTYLIWSANTSLGKTLVSTGIAASFLLQQPSSSATKLLYLKPIQTGFPSDSDSRFVFSKLDSLSLRRQIPISISNSVLHSSLPAAKSLGLNVEVSESGMCSLNFRDEKTVTGAPELLCKTLYAWEAAISPHLAAERENATVEDSVVLQMIEKCLKEEMECGVKSEKSDLLCLVETAGGVASPGPSGTLQCDLYRPFRLPGILVGDGRLGGISGTIAAYESLKLRGYDIAAVVFEDHGLVNEVPLTSYLRNKVPVLVLPPVPKDPSDDLIEWFVESDGVFKALKETMVLANLERLERLNGMAKLAGEVFWWPFTQHKLVHQETVTVIDSRCGENFSIYKASDNSSLSQQFDACASWWTQGPDPTFQAELAREMGYTAARFGHVMFPENVYEPALKCAELLLDGVGKGWASRVYFSDNGSTAIEIALKMAFRKFCVDHNFCEATEEEKHIVVKVIALRGSYHGDTLGAMEAQAPSPYTGFLQQPWYTGRGLFLDPPTVFLSNGSWNISLPESFSEIAPEYGTFTSRDEIFDKSRDASTLARIYSAYLSKHLQEHSGVRQSAHVGALIIEPVIHGKGGMHMVDPLFQRVLVNECRNRKIPVIFDEVFTGFWRLGVETTTELLGCKPDIACFAKLLTGGMVPLAVTLATDAVFDSFSGDSKLKALLHGHSYSAHAMGCATAAKAIQWFKDPETNHNITSQGKTLRELWDEELVQQISSHSAVQRVVVIGTLFALELKADASNSGYASLYAKSLLIMLREDGIFTRPLGNVIYLMCGPCTSPEICRRLLTKLYKRLGEFNRT

SEQ ID NO: 81 - protein, 833 aa, Synthetic construct
  source 1..833: note = Arabidopsis thaliana BioDA protein A609R
MIPVTATLIRHRLRHLRHRIRFKSTSVSPFHLPLNHPTYLIWSANTSLGKTLVSTGIAASFLLQQPSSSATKLLYLKPIQTGFPSDSDSRFVFSKLDSLSLRRQIPISISNSVLHSSLPAAKSLGLNVEVSESGMCSLNFRDEKTVTGAPELLCKTLYAWEAAISPHLAAERENATVEDSVVLQMIEKCLKEEMECGVKSEKSDLLCLVETAGGVASPGPSGTLQCDLYRPFRLPGILVGDGRLGGISGTIAAYESLKLRGYDIAAVVFEDHGLVNEVPLTSYLRNKVPVLVLPPVPKDPSDDLIEWFVESDGVFKALKETMVLANLERLERLNGMAKLAGEVFWWPFTQHKLVHQETVTVIDSRCGENFSIYKASDNSSLSQQFDACASWWTQGPDPTFQAELAREMGYTAARFGHVMFPENVYEPALKCAELLLDGVGKGWASRVYFSDNGSTAIEIALKMAFRKFCVDHNFCEATEEEKHIVVKVIALRGSYHGDTLGAMEAQAPSPYTGFLQQPWYTGRGLFLDPPTVFLSNGSWNISLPESFSEIAPEYGTFTSRDEIFDKSRDASTLARIYSAYLSKHLQEHSGVRQSAHVGALIIEPVIHGRGGMHMVDPLFQRVLVNECRNRKIPVIFDEVFTGFWRLGVETTTELLGCKPDIACFAKLLTGGMVPLAVTLATDAVFDSFSGDSKLKALLHGHSYSAHAMGCATAAKAIQWFKDPETNHNITSQGKTLRELWDEELVQQISSHSAVQRVVVIGTLFALELKADASNSGYASLYAKSLLIMLREDGIFTRPLGNVIYLMCGPCTSPEICRRLLTKLYKRLGEFNRT

SEQ ID NO: 82 - protein, 833 aa, Synthetic construct
  source 1..833: note = Arabidopsis thaliana BioDA protein A609Y
MIPVTATLIRHRLRHLRHRIRFKSTSVSPFHLPLNHPTYLIWSANTSLGKTLVSTGIAASFLLQQPSSSATKLLYLKPIQTGFPSDSDSRFVFSKLDSLSLRRQIPISISNSVLHSSLPAAKSLGLNVEVSESGMCSLNFRDEKTVTGAPELLCKTLYAWEAAISPHLAAERENATVEDSVVLQMIEKCLKEEMECGVKSEKSDLLCLVETAGGVASPGPSGTLQCDLYRPFRLPGILVGDGRLGGISGTIAAYESLKLRGYDIAAVVFEDHGLVNEVPLTSYLRNKVPVLVLPPVPKDPSDDLIEWFVESDGVFKALKETMVLANLERLERLNGMAKLAGEVFWWPFTQHKLVHQETVTVIDSRCGENFSIYKASDNSSLSQQFDACASWWTQGPDPTFQAELAREMGYTAARFGHVMFPENVYEPALKCAELLLDGVGKGWASRVYFSDNGSTAIEIALKMAFRKFCVDHNFCEATEEEKHIVVKVIALRGSYHGDTLGAMEAQAPSPYTGFLQQPWYTGRGLFLDPPTVFLSNGSWNISLPESFSEIAPEYGTFTSRDEIFDKSRDASTLARIYSAYLSKHLQEHSGVRQSAHVGALIIEPVIHGYGGMHMVDPLFQRVLVNECRNRKIPVIFDEVFTGFWRLGVETTTELLGCKPDIACFAKLLTGGMVPLAVTLATDAVFDSFSGDSKLKALLHGHSYSAHAMGCATAAKAIQWFKDPETNHNITSQGKTLRELWDEELVQQISSHSAVQRVVVIGTLFALELKADASNSGYASLYAKSLLIMLREDGIFTRPLGNVIYLMCGPCTSPEICRRLLTKLYKRLGEFNRT

SEQ ID NO: 83 - protein, 833 aa, Synthetic construct
  source 1..833: note = Arabidopsis thaliana BioDA protein C388M
MIPVTATLIRHRLRHLRHRIRFKSTSVSPFHLPLNHPTYLIWSANTSLGKTLVSTGIAASFLLQQPSSSATKLLYLKPIQTGFPSDSDSRFVFSKLDSLSLRRQIPISISNSVLHSSLPAAKSLGLNVEVSESGMCSLNFRDEKTVTGAPELLCKTLYAWEAAISPHLAAERENATVEDSVVLQMIEKCLKEEMECGVKSEKSDLLCLVETAGGVASPGPSGTLQCDLYRPFRLPGILVGDGRLGGISGTIAAYESLKLRGYDIAAVVFEDHGLVNEVPLTSYLRNKVPVLVLPPVPKDPSDDLIEWFVESDGVFKALKETMVLANLERLERLNGMAKLAGEVFWWPFTQHKLVHQETVTVIDSRCGENFSIYKASDNSSLSQQFDAMASWWTQGPDPTFQAELAREMGYTAARFGHVMFPENVYEPALKCAELLLDGVGKGWASRVYFSDNGSTAIEIALKMAFRKFCVDHNFCEATEEEKHIVVKVIALRGSYHGDTLGAMEAQAPSPYTGFLQQPWYTGRGLFLDPPTVFLSNGSWNISLPESFSEIAPEYGTFTSRDEIFDKSRDASTLARIYSAYLSKHLQEHSGVRQSAHVGALIIEPVIHGAGGMHMVDPLFQRVLVNECRNRKIPVIFDEVFTGFWRLGVETTTELLGCKPDIACFAKLLTGGMVPLAVTLATDAVFDSFSGDSKLKALLHGHSYSAHAMGCATAAKAIQWFKDPETNHNITSQGKTLRELWDEELVQQISSHSAVQRVVVIGTLFALELKADASNSGYASLYAKSLLIMLREDGIFTRPLGNVIYLMCGPCTSPEICRRLLTKLYKRLGEFNRT

SEQ ID NO: 84 - protein, 833 aa, Synthetic construct
  source 1..833: note = Arabidopsis thaliana BioDA protein F348A
MIPVTATLIRHRLRHLRHRIRFKSTSVSPFHLPLNHPTYLIWSANTSLGKTLVSTGIAASFLLQQPSSSATKLLYLKPIQTGFPSDSDSRFVFSKLDSLSLRRQIPISISNSVLHSSLPAAKSLGLNVEVSESGMCSLNFRDEKTVTGAPELLCKTLYAWEAAISPHLAAERENATVEDSVVLQMIEKCLKEEMECGVKSEKSDLLCLVETAGGVASPGPSGTLQCDLYRPFRLPGILVGDGRLGGISGTIAAYESLKLRGYDIAAVVFEDHGLVNEVPLTSYLRNKVPVLVLPPVPKDPSDDLIEWFVESDGVFKALKETMVLANLERLERLNGMAKLAGEVFWWPATQHKLVHQETVTVIDSRCGENFSIYKASDNSSLSQQFDACASWWTQGPDPTFQAELAREMGYTAARFGHVMFPENVYEPALKCAELLLDGVGKGWASRVYFSDNGSTAIEIALKMAFRKFCVDHNFCEATEEEKHIVVKVIALRGSYHGDTLGAMEAQAPSPYTGFLQQPWYTGRGLFLDPPTVFLSNGSWNISLPESFSEIAPEYGTFTSRDEIFDKSRDASTLARIYSAYLSKHLQEHSGVRQSAHVGALIIEPVIHGAGGMHMVDPLFQRVLVNECRNRKIPVIFDEVFTGFWRLGVETTTELLGCKPDIACFAKLLTGGMVPLAVTLATDAVFDSFSGDSKLKALLHGHSYSAHAMGCATAAKAIQWFKDPETNHNITSQGKTLRELWDEELVQQISSHSAVQRVVVIGTLFALELKADASNSGYASLYAKSLLIMLREDGIFTRPLGNVIYLMCGPCTSPEICRRLLTKLYKRLGEFNRT

SEQ ID NO: 85 - protein, 833 aa, Synthetic construct
  source 1..833: note = Arabidopsis thaliana BioDA protein F348E
MIPVTATLIRHRLRHLRHRIRFKSTSVSPFHLPLNHPTYLIWSANTSLGKTLVSTGIAASFLLQQPSSSATKLLYLKPIQTGFPSDSDSRFVFSKLDSLSLRRQIPISISNSVLHSSLPAAKSLGLNVEVSESGMCSLNFRDEKTVTGAPELLCKTLYAWEAAISPHLAAERENATVEDSVVLQMIEKCLKEEMECGVKSEKSDLLCLVETAGGVASPGPSGTLQCDLYRPFRLPGILVGDGRLGGISGTIAAYESLKLRGYDIAAVVFEDHGLVNEVPLTSYLRNKVPVLVLPPVPKDPSDDLIEWFVESDGVFKALKETMVLANLERLERLNGMAKLAGEVFWWPETQHKLVHQETVTVIDSRCGENFSIYKASDNSSLSQQFDACASWWTQGPDPTFQAELAREMGYTAARFGHVMFPENVYEPALKCAELLLDGVGKGWASRVYFSDNGSTAIEIALKMAFRKFCVDHNFCEATEEEKHIVVKVIALRGSYHGDTLGAMEAQAPSPYTGFLQQPWYTGRGLFLDPPTVFLSNGSWNISLPESFSEIAPEYGTFTSRDEIFDKSRDASTLARIYSAYLSKHLQEHSGVRQSAHVGALIIEPVIHGAGGMHMVDPLFQRVLVNECRNRKIPVIFDEVFTGFWRLGVETTTELLGCKPDIACFAKLLTGGMVPLAVTLATDAVFDSFSGDSKLKALLHGHSYSAHAMGCATAAKAIQWFKDPETNHNITSQGKTLRELWDEELVQQISSHSAVQRVVVIGTLFALELKADASNSGYASLYAKSLLIMLREDGIFTRPLGNVIYLMCGPCTSPEICRRLLTKLYKRLGEFNRT

SEQ ID NO: 86 - protein, 833 aa, Synthetic construct
  source 1..833: note = Arabidopsis thaliana BioDA protein F348I
MIPVTATLIRHRLRHLRHRIRFKSTSVSPFHLPLNHPTYLIWSANTSLGKTLVSTGIAASFLLQQPSSSATKLLYLKPIQTGFPSDSDSRFVFSKLDSLSLRRQIPISISNSVLHSSLPAAKSLGLNVEVSESGMCSLNFRDEKTVTGAPELLCKTLYAWEAAISPHLAAERENATVEDSVVLQMIEKCLKEEMECGVKSEKSDLLCLVETAGGVASPGPSGTLQCDLYRPFRLPGILVGDGRLGGISGTIAAYESLKLRGYDIAAVVFEDHGLVNEVPLTSYLRNKVPVLVLPPVPKDPSDDLIEWFVESDGVFKALKETMVLANLERLERLNGMAKLAGEVFWWPITQHKLVHQETVTVIDSRCGENFSIYKASDNSSLSQQFDACASWWTQGPDPTFQAELAREMGYTAARFGHVMFPENVYEPALKCAELLLDGVGKGWASRVYFSDNGSTAIEIALKMAFRKFCVDHNFCEATEEEKHIVVKVIALRGSYHGDTLGAMEAQAPSPYTGFLQQPWYTGRGLFLDPPTVFLSNGSWNISLPESFSEIAPEYGTFTSRDEIFDKSRDASTLARIYSAYLSKHLQEHSGVRQSAHVGALIIEPVIHGAGGMHMVDPLFQRVLVNECRNRKIPVIFDEVFTGFWRLGVETTTELLGCKPDIACFAKLLTGGMVPLAVTLATDAVFDSFSGDSKLKALLHGHSYSAHAMGCATAAKAIQWFKDPETNHNITSQGKTLRELWDEELVQQISSHSAVQRVVVIGTLFALELKADASNSGYASLYAKSLLIMLREDGIFTRPLGNVIYLMCGPCTSPEICRRLLTKLYKRLGEFNRT

SEQ ID NO: 87 - protein, 833 aa, Synthetic construct
  source 1..833: note = Arabidopsis thaliana BioDA protein F348K
MIPVTATLIRHRLRHLRHRIRFKSTSVSPFHLPLNHPTYLIWSANTSLGKTLVSTGIAASFLLQQPSSSATKLLYLKPIQTGFPSDSDSRFVFSKLDSLSLRRQIPISISNSVLHSSLPAAKSLGLNVEVSESGMCSLNFRDEKTVTGAPELLCKTLYAWEAAISPHLAAERENATVEDSVVLQMIEKCLKEEMECGVKSEKSDLLCLVETAGGVASPGPSGTLQCDLYRPFRLPGILVGDGRLGGISGTIAAYESLKLRGYDIAAVVFEDHGLVNEVPLTSYLRNKVPVLVLPPVPKDPSDDLIEWFVESDGVFKALKETMVLANLERLERLNGMAKLAGEVFWWPKTQHKLVHQETVTVIDSRCGENFSIYKASDNSSLSQQFDACASWWTQGPDPTFQAELAREMGYTAARFGHVMFPENVYEPALKCAELLLDGVGKGWASRVYFSDNGSTAIEIALKMAFRKFCVDHNFCEATEEEKHIVVKVIALRGSYHGDTLGAMEAQAPSPYTGFLQQPWYTGRGLFLDPPTVFLSNGSWNISLPESFSEIAPEYGTFTSRDEIFDKSRDASTLARIYSAYLSKHLQEHSGVRQSAHVGALIIEPVIHGAGGMHMVDPLFQRVLVNECRNRKIPVIFDEVFTGFWRLGVETTTELLGCKPDIACFAKLLTGGMVPLAVTLATDAVFDSFSGDSKLKALLHGHSYSAHAMGCATAAKAIQWFKDPETNHNITSQGKTLRELWDEELVQQISSHSAVQRVVVIGTLFALELKADASNSGYASLYAKSLLIMLREDGIFTRPLGNVIYLMCGPCTSPEICRRLLTKLYKRLGEFNRT

SEQ ID NO: 88 - protein, 833 aa, Synthetic construct
  source 1..833: note = Arabidopsis thaliana BioDA protein F348M
MIPVTATLIRHRLRHLRHRIRFKSTSVSPFHLPLNHPTYLIWSANTSLGKTLVSTGIAASFLLQQPSSSATKLLYLKPIQTGFPSDSDSRFVFSKLDSLSLRRQIPISISNSVLHSSLPAAKSLGLNVEVSESGMCSLNFRDEKTVTGAPELLCKTLYAWEAAISPHLAAERENATVEDSVVLQMIEKCLKEEMECGVKSEKSDLLCLVETAGGVASPGPSGTLQCDLYRPFRLPGILVGDGRLGGISGTIAAYESLKLRGYDIAAVVFEDHGLVNEVPLTSYLRNKVPVLVLPPVPKDPSDDLIEWFVESDGVFKALKETMVLANLERLERLNGMAKLAGEVFWWPMTQHKLVHQETVTVIDSRCGENFSIYKASDNSSLSQQFDACASWWTQGPDPTFQAELAREMGYTAARFGHVMFPENVYEPALKCAELLLDGVGKGWASRVYFSDNGSTAIEIALKMAFRKFCVDHNFCEATEEEKHIVVKVIALRGSYHGDTLGAMEAQAPSPYTGFLQQPWYTGRGLFLDPPTVFLSNGSWNISLPESFSEIAPEYGTFTSRDEIFDKSRDASTLARIYSAYLSKHLQEHSGVRQSAHVGALIIEPVIHGAGGMHMVDPLFQRVLVNECRNRKIPVIFDEVFTGFWRLGVETTTELLGCKPDIACFAKLLTGGMVPLAVTLATDAVFDSFSGDSKLKALLHGHSYSAHAMGCATAAKAIQWFKDPETNHNITSQGKTLRELWDEELVQQISSHSAVQRVVVIGTLFALELKADASNSGYASLYAKSLLIMLREDGIFTRPLGNVIYLMCGPCTSPEICRRLLTKLYKRLGEFNRT

SEQ ID NO: 89 - protein, 833 aa, Synthetic construct
  source 1..833: note = Arabidopsis thaliana BioDA protein F348Q
MIPVTATLIRHRLRHLRHRIRFKSTSVSPFHLPLNHPTYLIWSANTSLGKTLVSTGIAASFLLQQPSSSATKLLYLKPIQTGFPSDSDSRFVFSKLDSLSLRRQIPISISNSVLHSSLPAAKSLGLNVEVSESGMCSLNFRDEKTVTGAPELLCKTLYAWEAAISPHLAAERENATVEDSVVLQMIEKCLKEEMECGVKSEKSDLLCLVETAGGVASPGPSGTLQCDLYRPFRLPGILVGDGRLGGISGTIAAYESLKLRGYDIAAVVFEDHGLVNEVPLTSYLRNKVPVLVLPPVPKDPSDDLIEWFVESDGVFKALKETMVLANLERLERLNGMAKLAGEVFWWPQTQHKLVHQETVTVIDSRCGENFSIYKASDNSSLSQQFDACASWWTQGPDPTFQAELAREMGYTAARFGHVMFPENVYEPALKCAELLLDGVGKGWASRVYFSDNGSTAIEIALKMAFRKFCVDHNFCEATEEEKHIVVKVIALRGSYHGDTLGAMEAQAPSPYTGFLQQPWYTGRGLFLDPPTVFLSNGSWNISLPESFSEIAPEYGTFTSRDEIFDKSRDASTLARIYSAYLSKHLQEHSGVRQSAHVGALIIEPVIHGAGGMHMVDPLFQRVLVNECRNRKIPVIFDEVFTGFWRLGVETTTELLGCKPDIACFAKLLTGGMVPLAVTLATDAVFDSFSGDSKLKALLHGHSYSAHAMGCATAAKAIQWFKDPETNHNITSQGKTLRELWDEELVQQISSHSAVQRVVVIGTLFALELKADASNSGYASLYAKSLLIMLREDGIFTRPLGNVIYLMCGPCTSPEICRRLLTKLYKRLGEFNRT

SEQ ID NO: 90 - protein, 833 aa, Synthetic construct
  source 1..833: note = Arabidopsis thaliana BioDA protein F370L
MIPVTATLIRHRLRHLRHRIRFKSTSVSPFHLPLNHPTYLIWSANTSLGKTLVSTGIAASFLLQQPSSSATKLLYLKPIQTGFPSDSDSRFVFSKLDSLSLRRQIPISISNSVLHSSLPAAKSLGLNVEVSESGMCSLNFRDEKTVTGAPELLCKTLYAWEAAISPHLAAERENATVEDSVVLQMIEKCLKEEMECGVKSEKSDLLCLVETAGGVASPGPSGTLQCDLYRPFRLPGILVGDGRLGGISGTIAAYESLKLRGYDIAAVVFEDHGLVNEVPLTSYLRNKVPVLVLPPVPKDPSDDLIEWFVESDGVFKALKETMVLANLERLERLNGMAKLAGEVFWWPLTQHKLVHQETVTVIDSRCGENFSIYKASDNSSLSQQFDACASWWTQGPDPTFQAELAREMGYTAARFGHVMFPENVYEPALKCAELLLDGVGKGWASRVYFSDNGSTAIEIALKMAFRKFCVDHNFCEATEEEKHIVVKVIALRGSYHGDTLGAMEAQAPSPYTGFLQQPWYTGRGLFLDPPTVFLSNGSWNISLPESFSEIAPEYGTFTSRDEIFDKSRDASTLARIYSAYLSKHLQEHSGVRQSAHVGALIIEPVIHGAGGMHMVDPLFQRVLVNECRNRKIPVIFDEVFTGFWRLGVETTTELLGCKPDIACFAKLLTGGMVPLAVTLATDAVFDSFSGDSKLKALLHGHSYSAHAMGCATAAKAIQWFKDPETNHNITSQGKTLRELWDEELVQQISSHSAVQRVVVIGTLFALELKADASNSGYASLYAKSLLIMLREDGIFTRPLGNVIYLMCGPCTSPEICRRLLTKLYKRLGEFNRT

SEQ ID NO: 91 - protein, 833 aa, Synthetic construct; identical to SEQ ID NO: 86
  source 1..833: note = Arabidopsis thaliana BioDA protein F420I

SEQ ID NO: 92 - protein, 833 aa, Synthetic construct
  source 1..833: note = Arabidopsis thaliana BioDA protein G513A
MIPVTATLIRHRLRHLRHRIRFKSTSVSPFHLPLNHPTYLIWSANTSLGKTLVSTGIAASFLLQQPSSSATKLLYLKPIQTGFPSDSDSRFVFSKLDSLSLRRQIPISISNSVLHSSLPAAKSLGLNVEVSESGMCSLNFRDEKTVTGAPELLCKTLYAWEAAISPHLAAERENATVEDSVVLQMIEKCLKEEMECGVKSEKSDLLCLVETAGGVASPGPSGTLQCDLYRPFRLPGILVGDGRLGGISGTIAAYESLKLRGYDIAAVVFEDHGLVNEVPLTSYLRNKVPVLVLPPVPKDPSDDLIEWFVESDGVFKALKETMVLANLERLERLNGMAKLAGEVFWWPFTQHKLVHQETVTVIDSRCGENFSIYKASDNSSLSQQFDACASWWTQGPDPTFQAELAREMGYTAARFGHVMFPENVYEPALKCAELLLDGVGKGWASRVYFSDNGSTAIEIALKMAFRKFCVDHNFCEATEEEKHIVVKVIALRGSYHGDTLGAMEAQAPSPYTAFLQQPWYTGRGLFLDPPTVFLSNGSWNISLPESFSEIAPEYGTFTSRDEIFDKSRDASTLARIYSAYLSKHLQEHSGVRQSAHVGALIIEPVIHGAGGMHMVDPLFQRVLVNECRNRKIPVIFDEVFTGFWRLGVETTTELLGCKPDIACFAKLLTGGMVPLAVTLATDAVFDSFSGDSKLKALLHGHSYSAHAMGCATAAKAIQWFKDPETNHNITSQGKTLRELWDEELVQQISSHSAVQRVVVIGTLFALELKADASNSGYASLYAKSLLIMLREDGIFTRPLGNVIYLMCGPCTSPEICRRLLTKLYKRLGEFNRT

SEQ ID NO: 93 - protein, 833 aa, Synthetic construct
  source 1..833: note = Arabidopsis thaliana BioDA protein G608A
MIPVTATLIRHRLRHLRHRIRFKSTSVSPFHLPLNHPTYLIWSANTSLGKTLVSTGIAASFLLQQPSSSATKLLYLKPIQTGFPSDSDSRFVFSKLDSLSLRRQIPISISNSVLHSSLPAAKSLGLNVEVSESGMCSLNFRDEKTVTGAPELLCKTLYAWEAAISPHLAAERENATVEDSVVLQMIEKCLKEEMECGVKSEKSDLLCLVETAGGVASPGPSGTLQCDLYRPFRLPGILVGDGRLGGISGTIAAYESLKLRGYDIAAVVFEDHGLVNEVPLTSYLRNKVPVLVLPPVPKDPSDDLIEWFVESDGVFKALKETMVLANLERLERLNGMAKLAGEVFWWPFTQHKLVHQETVTVIDSRCGENFSIYKASDNSSLSQQFDACASWWTQGPDPTFQAELAREMGYTAARFGHVMFPENVYEPALKCAELLLDGVGKGWASRVYFSDNGSTAIEIALKMAFRKFCVDHNFCEATEEEKHIVVKVIALRGSYHGDTLGAMEAQAPSPYTGFLQQPWYTGRGLFLDPPTVFLSNGSWNISLPESFSEIAPEYGTFTSRDEIFDKSRDASTLARIYSAYLSKHLQEHSGVRQSAHVGALIIEPVIHAAGGMHMVDPLFQRVLVNECRNRKIPVIFDEVFTGFWRLGVETTTELLGCKPDIACFAKLLTGGMVPLAVTLATDAVFDSFSGDSKLKALLHGHSYSAHAMGCATAAKAIQWFKDPETNHNITSQGKTLRELWDEELVQQISSHSAVQRVVVIGTLFALELKADASNSGYASLYAKSLLIMLREDGIFTRPLGNVIYLMCGPCTSPEICRRLLTKLYKRLGEFNRT

SEQ ID NO: 94 - protein, 833 aa, Synthetic construct
  source 1..833: note = Arabidopsis thaliana BioDA protein G608I
MIPVTATLIRHRLRHLRHRIRFKSTSVSPFHLPLNHPTYLIWSANTSLGKTLVSTGIAASFLLQQPSSSATKLLYLKPIQTGFPSDSDSRFVFSKLDSLSLRRQIPISISNSVLHSSLPAAKSLGLNVEVSESGMCSLNFRDEKTVTGAPELLCKTLYAWEAAISPHLAAERENATVEDSVVLQMIEKCLKEEMECGVKSEKSDLLCLVETAGGVASPGPSGTLQCDLYRPFRLPGILVGDGRLGGISGTIAAYESLKLRGYDIAAVVFEDHGLVNEVPLTSYLRNKVPVLVLPPVPKDPSDDLIEWFVESDGVFKALKETMVLANLERLERLNGMAKLAGEVFWWPFTQHKLVHQETVTVIDSRCGENFSIYKASDNSSLSQQFDACASWWTQGPDPTFQAELAREMGYTAARFGHVMFPENVYEPALKCAELLLDGVGKGWASRVYFSDNGSTAIEIALKMAFRKFCVDHNFCEATEEEKHIVVKVIALRGSYHGDTLGAMEAQAPSPYTGFLQQPWYTGRGLFLDPPTVFLSNGSWNISLPESFSEIAPEYGTFTSRDEIFDKSRDASTLARIYSAYLSKHLQEHSGVRQSAHVGALIIEPVIHIAGGMHMVDPLFQRVLVNECRNRKIPVIFDEVFTGFWRLGVETTTELLGCKPDIACFAKLLTGGMVPLAVTLATDAVFDSFSGDSKLKALLHGHSYSAHAMGCATAAKAIQWFKDPETNHNITSQGKTLRELWDEELVQQISSHSAVQRVVVIGTLFALELKADASNSGYASLYAKSLLIMLREDGIFTRPLGNVIYLMCGPCTSPEICRRLLTKLYKRLGEFNRT

SEQ ID NO: 95 - protein, 833 aa, Synthetic construct
  source 1..833: note = Arabidopsis thaliana BioDA protein G610H
MIPVTATLIRHRLRHLRHRIRFKSTSVSPFHLPLNHPTYLIWSANTSLGKTLVSTGIAASFLLQQPSSSATKLLYLKPIQTGFPSDSDSRFVFSKLDSLSLRRQIPISISNSVLHSSLPAAKSLGLNVEVSESGMCSLNFRDEKTVTGAPELLCKTLYAWEAAISPHLAAERENATVEDSVVLQMIEKCLKEEMECGVKSEKSDLLCLVETAGGVASPGPSGTLQCDLYRPFRLPGILVGDGRLGGISGTIAAYESLKLRGYDIAAVVFEDHGLVNEVPLTSYLRNKVPVLVLPPVPKDPSDDLIEWFVESDGVFKALKETMVLANLERLERLNGMAKLAGEVFWWPFTQHKLVHQETVTVIDSRCGENFSIYKASDNSSLSQQFDACASWWTQGPDPTFQAELAREMGYTAARFGHVMFPENVYEPALKCAELLLDGVGKGWASRVYFSDNGSTAIEIALKMAFRKFCVDHNFCEATEEEKHIVVKVIALRGSYHGDTLGAMEAQAPSPYTGFLQQPWYTGRGLFLDPPTVFLSNGSWNISLPESFSEIAPEYGTFTSRDEIFDKSRDASTLARIYSAYLSKHLQEHSGVRQSAHVGALIIEPVIHGAHGMHMVDPLFQRVLVNECRNRKIPVIFDEVFTGFWRLGVETTTELLGCKPDIACFAKLLTGGMVPLAVTLATDAVFDSFSGDSKLKALLHGHSYSAHAMGCATAAKAIQWFKDPETNHNITSQGKTLRELWDEELVQQISSHSAVQRVVVIGTLFALELKADASNSGYASLYAKSLLIMLREDGIFTRPLGNVIYLMCGPCTSPEICRRLLTKLYKRLGEFNRT

SEQ ID NO: 96 - protein, 833 aa, Synthetic construct
  source 1..833: note = Arabidopsis thaliana BioDA protein G700C
MIPVTATLIRHRLRHLRHRIRFKSTSVSPFHLPLNHPTYLIWSANTSLGKTLVSTGIAASFLLQQPSSSATKLLYLKPIQTGFPSDSDSRFVFSKLDSLSLRRQIPISISNSVLHSSLPAAKSLGLNVEVSESGMCSLNFRDEKTVTGAPELLCKTLYAWEAAISPHLAAERENATVEDSVVLQMIEKCLKEEMECGVKSEKSDLLCLVETAGGVASPGPSGTLQCDLYRPFRLPGILVGDGRLGGISGTIAAYESLKLRGYDIAAVVFEDHGLVNEVPLTSYLRNKVPVLVLPPVPKDPSDDLIEWFVESDGVFKALKETMVLANLERLERLNGMAKLAGEVFWWPFTQHKLVHQETVTVIDSRCGENFSIYKASDNSSLSQQFDACASWWTQGPDPTFQAELAREMGYTAARFGHVMFPENVYEPALKCAELLLDGVGKGWASRVYFSDNGSTAIEIALKMAFRKFCVDHNFCEATEEEKHIVVKVIALRGSYHGDTLGAMEAQAPSPYTGFLQQPWYTGRGLFLDPPTVFLSNGSWNISLPESFSEIAPEYGTFTSRDEIFDKSRDASTLARIYSAYLSKHLQEHSGVRQSAHVGALIIEPVIHGAGGMHMVDPLFQRVLVNECRNRKIPVIFDEVFTGFWRLGVETTTELLGCKPDIACFAKLLTGGMVPLAVTLATDAVFDSFSGDSKLKALLHCHSYSAHAMGCATAAKAIQWFKDPETNHNITSQGKTLRELWDEELVQQISSHSAVQRVVVIGTLFALELKADASNSGYASLYAKSLLIMLREDGIFTRPLGNVIYLMCGPCTSPEICRRLLTKLYKRLGEFNRT

SEQ ID NO: 97 - protein, 833 aa, Synthetic construct
  source 1..833: note = Arabidopsis thaliana BioDA protein H496S
MIPVTATLIRHRLRHLRHRIRFKSTSVSPFHLPLNHPTYLIWSANTSLGKTLVSTGIAASFLLQQPSSSATKLLYLKPIQTGFPSDSDSRFVFSKLDSLSLRRQIPISISNSVLHSSLPAAKSLGLNVEVSESGMCSLNFRDEKTVTGAPELLCKTLYAWEAAISPHLAAERENATVEDSVVLQMIEKCLKEEMECGVKSEKSDLLCLVETAGGVASPGPSGTLQCDLYRPFRLPGILVGDGRLGGISGTIAAYESLKLRGYDIAAVVFEDHGLVNEVPLTSYLRNKVPVLVLPPVPKDPSDDLIEWFVESDGVFKALKETMVLANLERLERLNGMAKLAGEVFWWPFTQHKLVHQETVTVIDSRCGENFSIYKASDNSSLSQQFDACASWWTQGPDPTFQAELAREMGYTAARFGHVMFPENVYEPALKCAELLLDGVGKGWASRVYFSDNGSTAIEIALKMAFRKFCVDHNFCEATEEEKHIVVKVIALRGSYSGDTLGAMEAQAPSPYTGFLQQPWYTGRGLFLDPPTVFLSNGSWNISLPESFSEIAPEYGTFTSRDEIFDKSRDASTLARIYSAYLSKHLQEHSGVRQSAHVGALIIEPVIHGAGGMHMVDPLFQRVLVNECRNRKIPVIFDEVFTGFWRLGVETTTELLGCKPDIACFAKLLTGGMVPLAVTLATDAVFDSFSGDSKLKALLHGHSYSAHAMGCATAAKAIQWFKDPETNHNITSQGKTLRELWDEELVQQISSHSAVQRVVVIGTLFALELKADASNSGYASLYAKSLLIMLREDGIFTRPLGNVIYLMCGPCTSPEICRRLLTKLYKRLGEFNRT

SEQ ID NO: 98 - protein, 833 aa, Synthetic construct
  source 1..833: note = Arabidopsis thaliana BioDA protein M419I
MIPVTATLIRHRLRHLRHRIRFKSTSVSPFHLPLNHPTYLIWSANTSLGKTLVSTGIAASFLLQQPSSSATKLLYLKPIQTGFPSDSDSRFVFSKLDSLSLRRQIPISISNSVLHSSLPAAKSLGLNVEVSESGMCSLNFRDEKTVTGAPELLCKTLYAWEAAISPHLAAERENATVEDSVVLQMIEKCLKEEMECGVKSEKSDLLCLVETAGGVASPGPSGTLQCDLYRPFRLPGILVGDGRLGGISGTIAAYESLKLRGYDIAAVVFEDHGLVNEVPLTSYLRNKVPVLVLPPVPKDPSDDLIEWFVESDGVFKALKETMVLANLERLERLNGMAKLAGEVFWWPFTQHKLVHQETVTVIDSRCGENFSIYKASDNSSLSQQFDACASWWTQGPDPTFQAELAREMGYTAARFGHVIFPENVYEPALKCAELLLDGVGKGWASRVYFSDNGSTAIEIALKMAFRKFCVDHNFCEATEEEKHIVVKVIALRGSYHGDTLGAMEAQAPSPYTGFLQQPWYTGRGLFLDPPTVFLSNGSWNISLPESFSEIAPEYGTFTSRDEIFDKSRDASTLARIYSAYLSKHLQEHSGVRQSAHVGALIIEPVIHGAGGMHMVDPLFQRVLVNECRNRKIPVIFDEVFTGFWRLGVETTTELLGCKPDIACFAKLLTGGMVPLAVTLATDAVFDSFSGDSKLKALLHGHSYSAHAMGCATAAKAIQWFKDPETNHNITSQGKTLRELWDEELVQQISSHSAVQRVVVIGTLFALELKADASNSGYASLYAKSLLIMLREDGIFTRPLGNVIYLMCGPCTSPEICRRLLTKLYKRLGEFNRT

SEQ ID NO: 99 - protein, 833 aa, Synthetic construct
  source 1..833: note = Arabidopsis thaliana BioDA protein M612L
MIPVTATLIRHRLRHLRHRIRFKSTSVSPFHLPLNHPTYLIWSANTSLGKTLVSTGIAASFLLQQPSSSATKLLYLKPIQTGFPSDSDSRFVFSKLDSLSLRRQIPISISNSVLHSSLPAAKSLGLNVEVSESGMCSLNFRDEKTVTGAPELLCKTLYAWEAAISPHLAAERENATVEDSVVLQMIEKCLKEEMECGVKSEKSDLLCLVETAGGVASPGPSGTLQCDLYRPFRLPGILVGDGRLGGISGTIAAYESLKLRGYDIAAVVFEDHGLVNEVPLTSYLRNKVPVLVLPPVPKDPSDDLIEWFVESDGVFKALKETMVLANLERLERLNGMAKLAGEVFWWPFTQHKLVHQETVTVIDSRCGENFSIYKASDNSSLSQQFDACASWWTQGPDPTFQAELAREMGYTAARFGHVMFPENVYEPALKCAELLLDGVGKGWASRVYFSDNGSTAIEIALKMAFRKFCVDHNFCEATEEEKHIVVKVIALRGSYHGDTLGAMEAQAPSPYTGFLQQPWYTGRGLFLDPPTVFLSNGSWNISLPESFSEIAPEYGTFTSRDEIFDKSRDASTLARIYSAYLSKHLQEHSGVRQSAHVGALIIEPVIHGAGGLHMVDPLFQRVLVNECRNRKIPVIFDEVFTGFWRLGVETTTELLGCKPDIACFAKLLTGGMVPLAVTLATDAVFDSFSGDSKLKALLHGHSYSAHAMGCATAAKAIQWFKDPETNHNITSQGKTLRELWDEELVQQISSHSAVQRVVVIGTLFALELKADASNSGYASLYAKSLLIMLREDGIFTRPLGNVIYLMCGPCTSPEICRRLLTKLYKRLGEFNRT

SEQ ID NO: 100 - protein, 833 aa, Synthetic construct
  source 1..833: note = Arabidopsis thaliana BioDA protein P347A
MIPVTATLIRHRLRHLRHRIRFKSTSVSPFHLPLNHPTYLIWSANTSLGKTLVSTGIAASFLLQQPSSSATKLLYLKPIQTGFPSDSDSRFVFSKLDSLSLRRQIPISISNSVLHSSLPAAKSLGLNVEVSESGMCSLNFRDEKTVTGAPELLCKTLYAWEAAISPHLAAERENATVEDSVVLQMIEKCLKEEMECGVKSEKSDLLCLVETAGGVASPGPSGTLQCDLYRPFRLPGILVGDGRLGGISGTIAAYESLKLRGYDIAAVVFEDHGLVNEVPLTSYLRNKVPVLVLPPVPKDPSDDLIEWFVESDGVFKALKETMVLANLERLERLNGMAKLAGEVFWWAFTQHKLVHQETVTVIDSRCGENFSIYKASDNSSLSQQFDACASWWTQGPDPTFQAELAREMGYTAARFGHVMFPENVYEPALKCAELLLDGVGKGWASRVYFSDNGSTAIEIALKMAFRKFCVDHNFCEATEEEKHIVVKVIALRGSYHGDTLGAMEAQAPSPYTGFLQQPWYTGRGLFLDPPTVFLSNGSWNISLPESFSEIAPEYGTFTSRDEIFDKSRDASTLARIYSAYLSKHLQEHSGVRQSAHVGALIIEPVIHGAGGMHMVDPLFQRVLVNECRNRKIPVIFDEVFTGFWRLGVETTTELLGCKPDIACFAKLLTGGMVPLAVTLATDAVFDSFSGDSKLKALLHGHSYSAHAMGCATAAKAIQWFKDPETNHNITSQGKTLRELWDEELVQQISSHSAVQRVVVIGTLFALELKADASNSGYASLYAKSLLIMLREDGIFTRPLGNVIYLMCGPCTSPEICRRLLTKLYKRLGEFNRT

SEQ ID NO: 101 - protein, 833 aa, Synthetic construct
  source 1..833: note = Arabidopsis thaliana BioDA protein P347E
MIPVTATLIRHRLRHLRHRIRFKSTSVSPFHLPLNHPTYLIWSANTSLGKTLVSTGIAASFLLQQPSSSATKLLYLKPIQTGFPSDSDSRFVFSKLDSLSLRRQIPISISNSVLHSSLPAAKSLGLNVEVSESGMCSLNFRDEKTVTGAPELLCKTLYAWEAAISPHLAAERENATVEDSVVLQMIEKCLKEEMECGVKSEKSDLLCLVETAGGVASPGPSGTLQCDLYRPFRLPGILVGDGRLGGISGTIAAYESLKLRGYDIAAVVFEDHGLVNEVPLTSYLRNKVPVLVLPPVPKDPSDDLIEWFVESDGVFKALKETMVLANLERLERLNGMAKLAGEVFWWEFTQHKLVHQETVTVIDSRCGENFSIYKASDNSSLSQQFDACASWWTQGPDPTFQAELAREMGYTAARFGHVMFPENVYEPALKCAELLLDGVGKGWASRVYFSDNGSTAIEIALKMAFRKFCVDHNFCEATEEEKHIVVKVIALRGSYHGDTLGAMEAQAPSPYTGFLQQPWYTGRGLFLDPPTVFLSNGSWNISLPESFSEIAPEYGTFTSRDEIFDKSRDASTLARIYSAYLSKHLQEHSGVRQSAHVGALIIEPVIHGAGGMHMVDPLFQRVLVNECRNRKIPVIFDEVFTGFWRLGVETTTELLGCKPDIACFAKLLTGGMVPLAVTLATDAVFDSFSGDSKLKALLHGHSYSAHAMGCATAAKAIQWFKDPETNHNITSQGKTLRELWDEELVQQISSHSAVQRVVVIGTLFALELKADASNSGYASLYAKSLLIMLREDGIFTRPLGNVIYLMCGPCTSPEICRRLLTKLYKRLGEFNRT

SEQ ID NO: 102 - protein, 833 aa, Synthetic construct
  source 1..833: note = Arabidopsis thaliana BioDA protein P421A
MIPVTATLIRHRLRHLRHRIRFKSTSVSPFHLPLNHPTYLIWSANTSLGKTLVSTGIAASFLLQQPSSSATKLLYLKPIQTGFPSDSDSRFVFSKLDSLSLRRQIPISISNSVLHSSLPAAKSLGLNVEVSESGMCSLNFRDEKTVTGAPELLCKTLYAWEAAISPHLAAERENATVEDSVVLQMIEKCLKEEMECGVKSEKSDLLCLVETAGGVASPGPSGTLQCDLYRPFRLPGILVGDGRLGGISGTIAAYESLKLRGYDIAAVVFEDHGLVNEVPLTSYLRNKVPVLVLPPVPKDPSDDLIEWFVESDGVFKALKETMVLANLERLERLNGMAKLAGEVFWWPFTQHKLVHQETVTVIDSRCGENFSIYKASDNSSLSQQFDACASWWTQGPDPTFQAELAREMGYTAARFGHVMFAENVYEPALKCAELLLDGVGKGWASRVYFSDNGSTAIEIALKMAFRKFCVDHNFCEATEEEKHIVVKVIALRGSYHGDTLGAMEAQAPSPYTGFLQQPWYTGRGLFLDPPTVFLSNGSWNISLPESFSEIAPEYGTFTSRDEIFDKSRDASTLARIYSAYLSKHLQEHSGVRQSAHVGALIIEPVIHGAGGMHMVDPLFQRVLVNECRNRKIPVIFDEVFTGFWRLGVETTTELLGCKPDIACFAKLLTGGMVPLAVTLATDAVFDSFSGDSKLKALLHGHSYSAHAMGCATAAKAIQWFKDPETNHNITSQGKTLRELWDEELVQQISSHSAVQRVVVIGTLFALELKADASNSGYASLYAKSLLIMLREDGIFTRPLGNVIYLMCGPCTSPEICRRLLTKLYKRLGEFNRT

SEQ ID NO: 103 - protein, 836 aa, Synthetic construct
  source 1..836: note = Arabidopsis thaliana BioDA protein P421E
MIPVTATLIRHRLRHLRHRIRFKSTSVSPFHLPLNHPTYLIWSANTSLGKTLVSTGIAASFLLQQPSSSATKLLYLKPIQTGFPSDSDSRFVFSKLDSLSLRRQIPISISNSVLHSSLPAAKSLGLNVEVSESGMCSLNFRDEKTVTGAPELLCKTLYAWEAAISPHLAAERENATVEDSVVLQMIEKCLKEEMECGVKSEKSDLLCLVETAGGVASPGPSGTLQCDLYRPFRLPGILVGDGRLGGISGTIAAYESLKLRGYDIAAVVFEDHGLVNEVPLTSYLRNKVPVLVLPPVPKDPSDDLIEWFVESDGVFKALKETMVLANLERLERLNGMAKLAGEVFWWPFTQHKLVHQETVTVIDSRCGENFSIYKASDNSSLSQQFDACASWWTQGPDPTFQAELAREMGYTAARFGHVMFEENVYEPALKCAELLLDGVGKGWASRVYFSDNGSTAIEIALKMAFRKFCVDHNFCEATEEEKHIVVKVIALRGSYHGDTLGAMEAQAPSPYTGFLQQPWYTGRGLFLDPPTVFLSNGSWNISLPESFSEIAPEYGTFTSRDEIFDKSRDASTLARIYSAYLSKHLQEHSGVRQSAHVGALIIEPVIHGAGGMHMVDPLFQRVLVNECRNRKIPVIFDEVFTGFWRLGVETTTELLGCKPDIACFAKLLTGGMVPLAVTLATDAVFDSFSGDSKLKALLHGHSYSAHAMGCATAAKAIQWFKDPETNHNITSQGKTLRELWDEELVQQISSHSAVQRVVVIGTLFALELKADASNSGYASLYAKSLLIMLREDGIFTRPLGNVIYLMCGPCTSPEICRRLLTKLYKRLGEFNRTNRT

SEQ ID NO: 104 - skipped

SEQ ID NO: 105 - protein, 833 aa, Synthetic construct
  source 1..833: note = Arabidopsis thaliana BioDA protein P421W
MIPVTATLIRHRLRHLRHRIRFKSTSVSPFHLPLNHPTYLIWSANTSLGKTLVSTGIAASFLLQQPSSSATKLLYLKPIQTGFPSDSDSRFVFSKLDSLSLRRQIPISISNSVLHSSLPAAKSLGLNVEVSESGMCSLNFRDEKTVTGAPELLCKTLYAWEAAISPHLAAERENATVEDSVVLQMIEKCLKEEMECGVKSEKSDLLCLVETAGGVASPGPSGTLQCDLYRPFRLPGILVGDGRLGGISGTIAAYESLKLRGYDIAAVVFEDHGLVNEVPLTSYLRNKVPVLVLPPVPKDPSDDLIEWFVESDGVFKALKETMVLANLERLERLNGMAKLAGEVFWWPFTQHKLVHQETVTVIDSRCGENFSIYKASDNSSLSQQFDACASWWTQGPDPTFQAELAREMGYTAARFGHVMFWENVYEPALKCAELLLDGVGKGWASRVYFSDNGSTAIEIALKMAFRKFCVDHNFCEATEEEKHIVVKVIALRGSYHGDTLGAMEAQAPSPYTGFLQQPWYTGRGLFLDPPTVFLSNGSWNISLPESFSEIAPEYGTFTSRDEIFDKSRDASTLARIYSAYLSKHLQEHSGVRQSAHVGALIIEPVIHGAGGMHMVDPLFQRVLVNECRNRKIPVIFDEVFTGFWRLGVETTTELLGCKPDIACFAKLLTGGMVPLAVTLATDAVFDSFSGDSKLKALLHGHSYSAHAMGCATAAKAIQWFKDPETNHNITSQGKTLRELWDEELVQQISSHSAVQRVVVIGTLFALELKADASNSGYASLYAKSLLIMLREDGIFTRPLGNVIYLMCGPCTSPEICRRLLTKLYKRLGEFNRT

SEQ ID NO: 106 - protein, 833 aa, Synthetic construct
  source 1..833: note = Arabidopsis thaliana BioDA protein P510A
MIPVTATLIRHRLRHLRHRIRFKSTSVSPFHLPLNHPTYLIWSANTSLGKTLVSTGIAASFLLQQPSSSATKLLYLKPIQTGFPSDSDSRFVFSKLDSLSLRRQIPISISNSVLHSSLPAAKSLGLNVEVSESGMCSLNFRDEKTVTGAPELLCKTLYAWEAAISPHLAAERENATVEDSVVLQMIEKCLKEEMECGVKSEKSDLLCLVETAGGVASPGPSGTLQCDLYRPFRLPGILVGDGRLGGISGTIAAYESLKLRGYDIAAVVFEDHGLVNEVPLTSYLRNKVPVLVLPPVPKDPSDDLIEWFVESDGVFKALKETMVLANLERLERLNGMAKLAGEVFWWPFTQHKLVHQETVTVIDSRCGENFSIYKASDNSSLSQQFDACASWWTQGPDPTFQAELAREMGYTAARFGHVMFPENVYEPALKCAELLLDGVGKGWASRVYFSDNGSTAIEIALKMAFRKFCVDHNFCEATEEEKHIVVKVIALRGSYHGDTLGAMEAQAPSAYTGFLQQPWYTGRGLFLDPPTVFLSNGSWNISLPESFSEIAPEYGTFTSRDEIFDKSRDASTLARIYSAYLSKHLQEHSGVRQSAHVGALIIEPVIHGAGGMHMVDPLFQRVLVNECRNRKIPVIFDEVFTGFWRLGVETTTELLGCKPDIACFAKLLTGGMVPLAVTLATDAVFDSFSGDSKLKALLHGHSYSAHAMGCATAAKAIQWFKDPETNHNITSQGKTLRELWDEELVQQISSHSAVQRVVVIGTLFALELKADASNSGYASLYAKSLLIMLREDGIFTRPLGNVIYLMCGPCTSPEICRRLLTKLYKRLGEFNRT

SEQ ID NO: 107 - protein, 833 aa, Synthetic construct
  source 1..833: note = Arabidopsis thaliana BioDA protein P510C
MIPVTATLIRHRLRHLRHRIRFKSTSVSPFHLPLNHPTYLIWSANTSLGKTLVSTGIAASFLLQQPSSSATKLLYLKPIQTGFPSDSDSRFVFSKLDSLSLRRQIPISISNSVLHSSLPAAKSLGLNVEVSESGMCSLNFRDEKTVTGAPELLCKTLYAWEAAISPHLAAERENATVEDSVVLQMIEKCLKEEMECGVKSEKSDLLCLVETAGGVASPGPSGTLQCDLYRPFRLPGILVGDGRLGGISGTIAAYESLKLRGYDIAAVVFEDHGLVNEVPLTSYLRNKVPVLVLPPVPKDPSDDLIEWFVESDGVFKALKETMVLANLERLERLNGMAKLAGEVFWWPFTQHKLVHQETVTVIDSRCGENFSIYKASDNSSLSQQFDACASWWTQGPDPTFQAELAREMGYTAARFGHVMFPENVYEPALKCAELLLDGVGKGWASRVYFSDNGSTAIEIALKMAFRKFCVDHNFCEATEEEKHIVVKVIALRGSYHGDTLGAMEAQAPSCYTGFLQQPWYTGRGLFLDPPTVFLSNGSWNISLPESFSEIAPEYGTFTSRDEIFDKSRDASTLARIYSAYLSKHLQEHSGVRQSAHVGALIIEPVIHGAGGMHMVDPLFQRVLVNECRNRKIPVIFDEVFTGFWRLGVETTTELLGCKPDIACFAKLLTGGMVPLAVTLATDAVFDSFSGDSKLKALLHGHSYSAHAMGCATAAKAIQWFKDPETNHNITSQGKTLRELWDEELVQQISSHSAVQRVVVIGTLFALELKADASNSGYASLYAKSLLIMLREDGIFTRPLGNVIYLMCGPCTSPEICRRLLTKLYKRLGEFNRT

SEQ ID NO: 108 - protein, 833 aa, Synthetic construct
  source 1..833: note = Arabidopsis thaliana BioDA protein P510E
MIPVTATLIRHRLRHLRHRIRFKSTSVSPFHLPLNHPTYLIWSANTSLGKTLVSTGIAASFLLQQPSSSATKLLYLKPIQTGFPSDSDSRFVFSKLDSLSLRRQIPISISNSVLHSSLPAAKSLGLNVEVSESGMCSLNFRDEKTVTGAPELLCKTLYAWEAAISPHLAAERENATVEDSVVLQMIEKCLKEEMECGVKSEKSDLLCLVETAGGVASPGPSGTLQCDLYRPFRLPGILVGDGRLGGISGTIAAYESLKLRGYDIAAVVFEDHGLVNEVPLTSYLRNKVPVLVLPPVPKDPSDDLIEWFVESDGVFKALKETMVLANLERLERLNGMAKLAGEVFWWPFTQHKLVHQETVTVIDSRCGENFSIYKASDNSSLSQQFDACASWWTQGPDPTFQAELAREMGYTAARFGHVMFPENVYEPALKCAELLLDGVGKGWASRVYFSDNGSTAIEIALKMAFRKFCVDHNFCEATEEEKHIVVKVIALRGSYHGDTLGAMEAQAPSEYTGFLQQPWYTGRGLFLDPPTVFLSNGSWNISLPESFSEIAPEYGTFTSRDEIFDKSRDASTLARIYSAYLSKHLQEHSGVRQSAHVGALIIEPVIHGAGGMHMVDPLFQRVLVNECRNRKIPVIFDEVFTGFWRLGVETTTELLGCKPDIACFAKLLTGGMVPLAVTLATDAVFDSFSGDSKLKALLHGHSYSAHAMGCATAAKAIQWFKDPETNHNITSQGKTLRELWDEELVQQISSHSAVQRVVVIGTLFALELKADASNSGYASLYAKSLLIMLREDGIFTRPLGNVIYLMCGPCTSPEICRRLLTKLYKRLGEFNRT

SEQ ID NO: 109 - protein, 833 aa, Synthetic construct
  source 1..833: note = Arabidopsis thaliana BioDA protein P510Q
MIPVTATLIRHRLRHLRHRIRFKSTSVSPFHLPLNHPTYLIWSANTSLGKTLVSTGIAASFLLQQPSSSATKLLYLKPIQTGFPSDSDSRFVFSKLDSLSLRRQIPISISNSVLHSSLPAAKSLGLNVEVSESGMCSLNFRDEKTVTGAPELLCKTLYAWEAAISPHLAAERENATVEDSVVLQMIEKCLKEEMECGVKSEKSDLLCLVETAGGVASPGPSGTLQCDLYRPFRLPGILVGDGRLGGISGTIAAYESLKLRGYDIAAVVFEDHGLVNEVPLTSYLRNKVPVLVLPPVPKDPSDDLIEWFVESDGVFKALKETMVLANLERLERLNGMAKLAGEVFWWPFTQHKLVHQETVTVIDSRCGENFSIYKASDNSSLSQQFDACASWWTQGPDPTFQAELAREMGYTAARFGHVMFPENVYEPALKCAELLLDGVGKGWASRVYFSDNGSTAIEIALKMAFRKFCVDHNFCEATEEEKHIVVKVIALRGSYHGDTLGAMEAQAPSQYTGFLQQPWYTGRGLFLDPPTVFLSNGSWNISLPESFSEIAPEYGTFTSRDEIFDKSRDASTLARIYSAYLSKHLQEHSGVRQSAHVGALIIEPVIHGAGGMHMVDPLFQRVLVNECRNRKIPVIFDEVFTGFWRLGVETTTELLGCKPDIACFAKLLTGGMVPLAVTLATDAVFDSFSGDSKLKALLHGHSYSAHAMGCATAAKAIQWFKDPETNHNITSQGKTLRELWDEELVQQISSHSAVQRVVVIGTLFALELKADASNSGYASLYAKSLLIMLREDGIFTRPLGNVIYLMCGPCTSPEICRRLLTKLYKRLGEFNRT

SEQ ID NO: 110 - protein, 833 aa, Synthetic construct
  source 1..833: note = Arabidopsis thaliana BioDA protein P510V
MIPVTATLIRHRLRHLRHRIRFKSTSVSPFHLPLNHPTYLIWSANTSLGKTLVSTGIAASFLLQQPSSSATKLLYLKPIQTGFPSDSDSRFVFSKLDSLSLRRQIPISISNSVLHSSLPAAKSLGLNVEVSESGMCSLNFRDEKTVTGAPELLCKTLYAWEAAISPHLAAERENATVEDSVVLQMIEKCLKEEMECGVKSEKSDLLCLVETAGGVASPGPSGTLQCDLYRPFRLPGILVGDGRLGGISGTIAAYESLKLRGYDIAAVVFEDHGLVNEVPLTSYLRNKVPVLVLPPVPKDPSDDLIEWFVESDGVFKALKETMVLANLERLERLNGMAKLAGEVFWWPFTQHKLVHQETVTVIDSRCGENFSIYKASDNSSLSQQFDACASWWTQGPDPTFQAELAREMGYTAARFGHVMFPENVYEPALKCAELLLDGVGKGWASRVYFSDNGSTAIEIALKMAFRKFCVDHNFCEATEEEKHIVVKVIALRGSYHGDTLGAMEAQAPSVYTGFLQQPWYTGRGLFLDPPTVFLSNGSWNISLPESFSEIAPEYGTFTSRDEIFDKSRDASTLARIYSAYLSKHLQEHSGVRQSAHVGALIIEPVIHGAGGMHMVDPLFQRVLVNECRNRKIPVIFDEVFTGFWRLGVETTTELLGCKPDIACFAKLLTGGMVPLAVTLATDAVFDSFSGDSKLKALLHGHSYSAHAMGCATAAKAIQWFKDPETNHNITSQGKTLRELWDEELVQQISSHSAVQRVVVIGTLFALELKADASNSGYASLYAKSLLIMLREDGIFTRPLGNVIYLMCGPCTSPEICRRLLTKLYKRLGEFNRT

SEQ ID NO: 111 - protein, 833 aa, Synthetic construct
  source 1..833: note = Arabidopsis thaliana BioDA protein P529A
MIPVTATLIRHRLRHLRHRIRFKSTSVSPFHLPLNHPTYLIWSANTSLGKTLVSTGIAASFLLQQPSSSATKLLYLKPIQTGFPSDSDSRFVFSKLDSLSLRRQIPISISNSVLHSSLPAAKSLGLNVEVSESGMCSLNFRDEKTVTGAPELLCKTLYAWEAAISPHLAAERENATVEDSVVLQMIEKCLKEEMECGVKSEKSDLLCLVETAGGVASPGPSGTLQCDLYRPFRLPGILVGDGRLGGISGTIAAYESLKLRGYDIAAVVFEDHGLVNEVPLTSYLRNKVPVLVLPPVPKDPSDDLIEWFVESDGVFKALKETMVLANLERLERLNGMAKLAGEVFWWPFTQHKLVHQETVTVIDSRCGENFSIYKASDNSSLSQQFDACASWWTQGPDPTFQAELAREMGYTAARFGHVMFPENVYEPALKCAELLLDGVGKGWASRVYFSDNGSTAIEIALKMAFRKFCVDHNFCEATEEEKHIVVKVIALRGSYHGDTLGAMEAQAPSPYTGFLQQPWYTGRGLFLDAPTVFLSNGSWNISLPESFSEIAPEYGTFTSRDEIFDKSRDASTLARIYSAYLSKHLQEHSGVRQSAHVGALIIEPVIHGAGGMHMVDPLFQRVLVNECRNRKIPVIFDEVFTGFWRLGVETTTELLGCKPDIACFAKLLTGGMVPLAVTLATDAVFDSFSGDSKLKALLHGHSYSAHAMGCATAAKAIQWFKDPETNHNITSQGKTLRELWDEELVQQISSHSAVQRVVVIGTLFALELKADASNSGYASLYAKSLLIMLREDGIFTRPLGNVIYLMCGPCTSPEICRRLLTKLYKRLGEFNRT

SEQ ID NO: 112 - protein, 833 aa, Synthetic construct
  source 1..833: note = Arabidopsis thaliana BioDA protein Q350H
MIPVTATLIRHRLRHLRHRIRFKSTSVSPFHLPLNHPTYLIWSANTSLGKTLVSTGIAASFLLQQPSSSATKLLYLKPIQTGFPSDSDSRFVFSKLDSLSLRRQIPISISNSVLHSSLPAAKSLGLNVEVSESGMCSLNFRDEKTVTGAPELLCKTLYAWEAAISPHLAAERENATVEDSVVLQMIEKCLKEEMECGVKSEKSDLLCLVETAGGVASPGPSGTLQCDLYRPFRLPGILVGDGRLGGISGTIAAYESLKLRGYDIAAVVFEDHGLVNEVPLTSYLRNKVPVLVLPPVPKDPSDDLIEWFVESDGVFKALKETMVLANLERLERLNGMAKLAGEVFWWPFTHHKLVHQETVTVIDSRCGENFSIYKASDNSSLSQQFDACASWWTQGPDPTFQAELAREMGYTAARFGHVMFPENVYEPALKCAELLLDGVGKGWASRVYFSDNGSTAIEIALKMAFRKFCVDHNFCEATEEEKHIVVKVIALRGSYHGDTLGAMEAQAPSPYTGFLQQPWYTGRGLFLDPPTVFLSNGSWNISLPESFSEIAPEYGTFTSRDEIFDKSRDASTLARIYSAYLSKHLQEHSGVRQSAHVGALIIEPVIHGAGGMHMVDPLFQRVLVNECRNRKIPVIFDEVFTGFWRLGVETTTELLGCKPDIACFAKLLTGGMVPLAVTLATDAVFDSFSGDSKLKALLHGHSYSAHAMGCATAAKAIQWFKDPETNHNITSQGKTLRELWDEELVQQISSHSAVQRVVVIGTLFALELKADASNSGYASLYAKSLLIMLREDGIFTRPLGNVIYLMCGPCTSPEICRRLLTKLYKRLGEFNRT

SEQ ID NO: 113 - protein, 833 aa, Synthetic construct
  source 1..833: note = Arabidopsis thaliana BioDA protein Q350S
MIPVTATLIRHRLRHLRHRIRFKSTSVSPFHLPLNHPTYLIWSANTSLGKTLVSTGIAASFLLQQPSSSATKLLYLKPIQTGFPSDSDSRFVFSKLDSLSLRRQIPISISNSVLHSSLPAAKSLGLNVEVSESGMCSLNFRDEKTVTGAPELLCKTLYAWEAAISPHLAAERENATVEDSVVLQMIEKCLKEEMECGVKSEKSDLLCLVETAGGVASPGPSGTLQCDLYRPFRLPGILVGDGRLGGISGTIAAYESLKLRGYDIAAVVFEDHGLVNEVPLTSYLRNKVPVLVLPPVPKDPSDDLIEWFVESDGVFKALKETMVLANLERLERLNGMAKLAGEVFWWPFTSHKLVHQETVTVIDSRCGENFSIYKASDNSSLSQQFDACASWWTQGPDPTFQAELAREMGYTAARFGHVMFPENVYEPALKCAELLLDGVGKGWASRVYFSDNGSTAIEIALKMAFRKFCVDHNFCEATEEEKHIVVKVIALRGSYHGDTLGAMEAQAPSPYTGFLQQPWYTGRGLFLDPPTVFLSNGSWNISLPESFSEIAPEYGTFTSRDEIFDKSRDASTLARIYSAYLSKHLQEHSGVRQSAHVGALIIEPVIHGAGGMHMVDPLFQRVLVNECRNRKIPVIFDEVFTGFWRLGVETTTELLGCKPDIACFAKLLTGGMVPLAVTLATDAVFDSFSGDSKLKALLHGHSYSAHAMGCATAAKAIQWFKDPETNHNITSQGKTLRELWDEELVQQISSHSAVQRVVVIGTLFALELKADASNSGYASLYAKSLLIMLREDGIFTRPLGNVIYLMCGPCTSPEICRRLLTKLYKRLGEFNRT

SEQ ID NO: 114 - protein, 833 aa, Synthetic construct
  source 1..833: note = Arabidopsis thaliana BioDA protein Q517H
MIPVTATLIRHRLRHLRHRIRFKSTSVSPFHLPLNHPTYLIWSANTSLGKTLVSTGIAASFLLQQPSSSATKLLYLKPIQTGFPSDSDSRFVFSKLDSLSLRRQIPISISNSVLHSSLPAAKSLGLNVEVSESGMCSLNFRDEKTVTGAPELLCKTLYAWEAAISPHLAAERENATVEDSVVLQMIEKCLKEEMECGVKSEKSDLLCLVETAGGVASPGPSGTLQCDLYRPFRLPGILVGDGRLGGISGTIAAYESLKLRGYDIAAVVFEDHGLVNEVPLTSYLRNKVPVLVLPPVPKDPSDDLIEWFVESDGVFKALKETMVLANLERLERLNGMAKLAGEVFWWPFTQHKLVHQETVTVIDSRCGENFSIYKASDNSSLSQQFDACASWWTQGPDPTFQAELAREMGYTAARFGHVMFPENVYEPALKCAELLLDGVGKGWASRVYFSDNGSTAIEIALKMAFRKFCVDHNFCEATEEEKHIVVKVIALRGSYHGDTLGAMEAQAPSPYTGFLQHPWYTGRGLFLDPPTVFLSNGSWNISLPESFSEIAPEYGTFTSRDEIFDKSRDASTLARIYSAYLSKHLQEHSGVRQSAHVGALIIEPVIHGAGGMHMVDPLFQRVLVNECRNRKIPVIFDEVFTGFWRLGVETTTELLGCKPDIACFAKLLTGGMVPLAVTLATDAVFDSFSGDSKLKALLHGHSYSAHAMGCATAAKAIQWFKDPETNHNITSQGKTLRELWDEELVQQISSHSAVQRVVVIGTLFALELKADASNSGYASLYAKSLLIMLREDGIFTRPLGNVIYLMCGPCTSPEICRRLLTKLYKRLGEFNRT

SEQ ID NO: 115 - protein, 833 aa, Synthetic construct
  source 1..833: note = Arabidopsis thaliana BioDA protein Q517I
MIPVTATLIRHRLRHLRHRIRFKSTSVSPFHLPLNHPTYLIWSANTSLGKTLVSTGIAASFLLQQPSSSATKLLYLKPIQTGFPSDSDSRFVFSKLDSLSLRRQIPISISNSVLHSSLPAAKSLGLNVEVSESGMCSLNFRDEKTVTGAPELLCKTLYAWEAAISPHLAAERENATVEDSVVLQMIEKCLKEEMECGVKSEKSDLLCLVETAGGVASPGPSGTLQCDLYRPFRLPGILVGDGRLGGISGTIAAYESLKLRGYDIAAVVFEDHGLVNEVPLTSYLRNKVPVLVLPPVPKDPSDDLIEWFVESDGVFKALKETMVLANLERLERLNGMAKLAGEVFWWPFTQHKLVHQETVTVIDSRCGENFSIYKASDNSSLSQQFDACASWWTQGPDPTFQAELAREMGYTAARFGHVMFPENVYEPALKCAELLLDGVGKGWASRVYFSDNGSTAIEIALKMAFRKFCVDHNFCEATEEEKHIVVKVIALRGSYHGDTLGAMEAQAPSPYTGFLQIPWYTGRGLFLDPPTVFLSNGSWNISLPESFSEIAPEYGTFTSRDEIFDKSRDASTLARIYSAYLSKHLQEHSGVRQSAHVGALIIEPVIHGAGGMHMVDPLFQRVLVNECRNRKIPVIFDEVFTGFWRLGVETTTELLGCKPDIACFAKLLTGGMVPLAVTLATDAVFDSFSGDSKLKALLHGHSYSAHAMGCATAAKAIQWFKDPETNHNITSQGKTLRELWDEELVQQISSHSAVQRVVVIGTLFALELKADASNSGYASLYAKSLLIMLREDGIFTRPLGNVIYLMCGPCTSPEICRRLLTKLYKRLGEFNRT

SEQ ID NO: 116 - protein, 833 aa, Synthetic construct
  source 1..833: note = Arabidopsis thaliana BioDA protein Q517W
MIPVTATLIRHRLRHLRHRIRFKSTSVSPFHLPLNHPTYLIWSANTSLGKTLVSTGIAASFLLQQPSSSATKLLYLKPIQTGFPSDSDSRFVFSKLDSLSLRRQIPISISNSVLHSSLPAAKSLGLNVEVSESGMCSLNFRDEKTVTGAPELLCKTLYAWEAAISPHLAAERENATVEDSVVLQMIEKCLKEEMECGVKSEKSDLLCLVETAGGVASPGPSGTLQCDLYRPFRLPGILVGDGRLGGISGTIAAYESLKLRGYDIAAVVFEDHGLVNEVPLTSYLRNKVPVLVLPPVPKDPSDDLIEWFVESDGVFKALKETMVLANLERLERLNGMAKLAGEVFWWPFTQHKLVHQETVTVIDSRCGENFSIYKASDNSSLSQQFDACASWWTQGPDPTFQAELAREMGYTAARFGHVMFPENVYEPALKCAELLLDGVGKGWASRVYFSDNGSTAIEIALKMAFRKFCVDHNFCEATEEEKHIVVKVIALRGSYHGDTLGAMEAQAPSPYTGFLQWPWYTGRGLFLDPPTVFLSNGSWNISLPESFSEIAPEYGTFTSRDEIFDKSRDASTLARIYSAYLSKHLQEHSGVRQSAHVGALIIEPVIHGAGGMHMVDPLFQRVLVNECRNRKIPVIFDEVFTGFWRLGVETTTELLGCKPDIACFAKLLTGGMVPLAVTLATDAVFDSFSGDSKLKALLHGHSYSAHAMGCATAAKAIQWFKDPETNHNITSQGKTLRELWDEELVQQISSHSAVQRVVVIGTLFALELKADASNSGYASLYAKSLLIMLREDGIFTRPLGNVIYLMCGPCTSPEICRRLLTKLYKRLGEFNRT

SEQ ID NO: 117 - protein, 833 aa, Synthetic construct
  source 1..833: note = Arabidopsis thaliana BioDA protein R756K
MIPVTATLIRHRLRHLRHRIRFKSTSVSPFHLPLNHPTYLIWSANTSLGKTLVSTGIAASFLLQQPSSSATKLLYLKPIQTGFPSDSDSRFVFSKLDSLSLRRQIPISISNSVLHSSLPAAKSLGLNVEVSESGMCSLNFRDEKTVTGAPELLCKTLYAWEAAISPHLAAERENATVEDSVVLQMIEKCLKEEMECGVKSEKSDLLCLVETAGGVASPGPSGTLQCDLYRPFRLPGILVGDGRLGGISGTIAAYESLKLRGYDIAAVVFEDHGLVNEVPLTSYLRNKVPVLVLPPVPKDPSDDLIEWFVESDGVFKALKETMVLANLERLERLNGMAKLAGEVFWWPFTQHKLVHQETVTVIDSRCGENFSIYKASDNSSLSQQFDACASWWTQGPDPTFQAELAREMGYTAARFGHVMFPENVYEPALKCAELLLDGVGKGWASRVYFSDNGSTAIEIALKMAFRKFCVDHNFCEATEEEKHIVVKVIALRGSYHGDTLGAMEAQAPSPYTGFLQQPWYTGRGLFLDPPTVFLSNGSWNISLPESFSEIAPEYGTFTSRDEIFDKSRDASTLARIYSAYLSKHLQEHSGVRQSAHVGALIIEPVIHGAGGMHMVDPLFQRVLVNECRNRKIPVIFDEVFTGFWRLGVETTTELLGCKPDIACFAKLLTGGMVPLAVTLATDAVFDSFSGDSKLKALLHGHSYSAHAMGCATAAKAIQWFKDPETNHNITSQGKTLRELWDEELVQQISSHSAVQKVVVIGTLFALELKADASNSGYASLYAKSLLIMLREDGIFTRPLGNVIYLMCGPCTSPEICRRLLTKLYKRLGEFNRT

SEQ ID NO: 118 - protein, 833 aa, Synthetic construct
  source 1..833: note = Arabidopsis thaliana BioDA protein R790C
MIPVTATLIRHRLRHLRHRIRFKSTSVSPFHLPLNHPTYLIWSANTSLGKTLVSTGIAASFLLQQPSSSATKLLYLKPIQTGFPSDSDSRFVFSKLDSLSLRRQIPISISNSVLHSSLPAAKSLGLNVEVSESGMCSLNFRDEKTVTGAPELLCKTLYAWEAAISPHLAAERENATVEDSVVLQMIEKCLKEEMECGVKSEKSDLLCLVETAGGVASPGPSGTLQCDLYRPFRLPGILVGDGRLGGISGTIAAYESLKLRGYDIAAVVFEDHGLVNEVPLTSYLRNKVPVLVLPPVPKDPSDDLIEWFVESDGVFKALKETMVLANLERLERLNGMAKLAGEVFWWPFTQHKLVHQETVTVIDSRCGENFSIYKASDNSSLSQQFDACASWWTQGPDPTFQAELAREMGYTAARFGHVMFPENVYEPALKCAELLLDGVGKGWASRVYFSDNGSTAIEIALKMAFRKFCVDHNFCEATEEEKHIVVKVIALRGSYHGDTLGAMEAQAPSPYTGFLQQPWYTGRGLFLDPPTVFLSNGSWNISLPESFSEIAPEYGTFTSRDEIFDKSRDASTLARIYSAYLSKHLQEHSGVRQSAHVGALIIEPVIHGAGGMHMVDPLFQRVLVNECRNRKIPVIFDEVFTGFWRLGVETTTELLGCKPDIACFAKLLTGGMVPLAVTLATDAVFDSFSGDSKLKALLHGHSYSAHAMGCATAAKAIQWFKDPETNHNITSQGKTLRELWDEELVQQISSHSAVQRVVVIGTLFALELKADASNSGYASLYAKSLLIMLCEDGIFTRPLGNVIYLMCGPCTSPEICRRLLTKLYKRLGEFNRT

SEQ ID NO: 119 - protein, 833 aa, Synthetic construct
  source 1..833: note = Arabidopsis thaliana BioDA protein R797Q
MIPVTATLIRHRLRHLRHRIRFKSTSVSPFHLPLNHPTYLIWSANTSLGKTLVSTGIAASFLLQQPSSSATKLLYLKPIQTGFPSDSDSRFVFSKLDSLSLRRQIPISISNSVLHSSLPAAKSLGLNVEVSESGMCSLNFRDEKTVTGAPELLCKTLYAWEAAISPHLAAERENATVEDSVVLQMIEKCLKEEMECGVKSEKSDLLCLVETAGGVASPGPSGTLQCDLYRPFRLPGILVGDGRLGGISGTIAAYESLKLRGYDIAAVVFEDHGLVNEVPLTSYLRNKVPVLVLPPVPKDPSDDLIEWFVESDGVFKALKETMVLANLERLERLNGMAKLAGEVFWWPFTQHKLVHQETVTVIDSRCGENFSIYKASDNSSLSQQFDACASWWTQGPDPTFQAELAREMGYTAARFGHVMFPENVYEPALKCAELLLDGVGKGWASRVYFSDNGSTAIEIALKMAFRKFCVDHNFCEATEEEKHIVVKVIALRGSYHGDTLGAMEAQAPSPYTGFLQQPWYTGRGLFLDPPTVFLSNGSWNISLPESFSEIAPEYGTFTSRDEIFDKSRDASTLARIYSAYLSKHLQEHSGVRQSAHVGALIIEPVIHGAGGMHMVDPLFQRVLVNECRNRKIPVIFDEVFTGFWRLGVETTTELLGCKPDIACFAKLLTGGMVPLAVTLATDAVFDSFSGDSKLKALLHGHSYSAHAMGCATAAKAIQWFKDPETNHNITSQGKTLRELWDEELVQQISSHSAVQRVVVIGTLFALELKADASNSGYASLYAKSLLIMLREDGIFTQPLGNVIYLMCGPCTSPEICRRLLTKLYKRLGEFNRT

SEQ ID NO: 120 - protein, 833 aa, Synthetic construct
  source 1..833: note = Arabidopsis thaliana BioDA protein S390C
MIPVTATLIRHRLRHLRHRIRFKSTSVSPFHLPLNHPTYLIWSANTSLGKTLVSTGIAASFLLQQPSSSATKLLYLKPIQTGFPSDSDSRFVFSKLDSLSLRRQIPISISNSVLHSSLPAAKSLGLNVEVSESGMCSLNFRDEKTVTGAPELLCKTLYAWEAAISPHLAAERENATVEDSVVLQMIEKCLKEEMECGVKSEKSDLLCLVETAGGVASPGPSGTLQCDLYRPFRLPGILVGDGRLGGISGTIAAYESLKLRGYDIAAVVFEDHGLVNEVPLTSYLRNKVPVLVLPPVPKDPSDDLIEWFVESDGVFKALKETMVLANLERLERLNGMAKLAGEVFWWPFTQHKLVHQETVTVIDSRCGENFSIYKASDNSSLSQQFDACACWWTQGPDPTFQAELAREMGYTAARFGHVMFPENVYEPALKCAELLLDGVGKGWASRVYFSDNGSTAIEIALKMAFRKFCVDHNFCEATEEEKHIVVKVIALRGSYHGDTLGAMEAQAPSPYTGFLQQPWYTGRGLFLDPPTVFLSNGSWNISLPESFSEIAPEYGTFTSRDEIFDKSRDASTLARIYSAYLSKHLQEHSGVRQSAHVGALIIEPVIHGAGGMHMVDPLFQRVLVNECRNRKIPVIFDEVFTGFWRLGVETTTELLGCKPDIACFAKLLTGGMVPLAVTLATDAVFDSFSGDSKLKALLHGHSYSAHAMGCATAAKAIQWFKDPETNHNITSQGKTLRELWDEELVQQISSHSAVQRVVVIGTLFALELKADASNSGYASLYAKSLLIMLREDGIFTRPLGNVIYLMCGPCTSPEICRRLLTKLYKRLGEFNRT

SEQ ID NO: 121 - protein, 833 aa, Synthetic construct
  source 1..833: note = Arabidopsis thaliana BioDA protein S494A
MIPVTATLIRHRLRHLRHRIRFKSTSVSPFHLPLNHPTYLIWSANTSLGKTLVSTGIAASFLLQQPSSSATKLLYLKPIQTGFPSDSDSRFVFSKLDSLSLRRQIPISISNSVLHSSLPAAKSLGLNVEVSESGMCSLNFRDEKTVTGAPELLCKTLYAWEAAISPHLAAERENATVEDSVVLQMIEKCLKEEMECGVKSEKSDLLCLVETAGGVASPGPSGTLQCDLYRPFRLPGILVGDGRLGGISGTIAAYESLKLRGYDIAAVVFEDHGLVNEVPLTSYLRNKVPVLVLPPVPKDPSDDLIEWFVESDGVFKALKETMVLANLERLERLNGMAKLAGEVFWWPFTQHKLVHQETVTVIDSRCGENFSIYKASDNSSLSQQFDACASWWTQGPDPTFQAELAREMGYTAARFGHVMFPENVYEPALKCAELLLDGVGKGWASRVYFSDNGSTAIEIALKMAFRKFCVDHNFCEATEEEKHIVVKVIALRGAYHGDTLGAMEAQAPSPYTGFLQQPWYTGRGLFLDPPTVFLSNGSWNISLPESFSEIAPEYGTFTSRDEIFDKSRDASTLARIYSAYLSKHLQEHSGVRQSAHVGALIIEPVIHGAGGMHMVDPLFQRVLVNECRNRKIPVIFDEVFTGFWRLGVETTTELLGCKPDIACFAKLLTGGMVPLAVTLATDAVFDSFSGDSKLKALLHGHSYSAHAMGCATAAKAIQWFKDPETNHNITSQGKTLRELWDEELVQQISSHSAVQRVVVIGTLFALELKADASNSGYASLYAKSLLIMLREDGIFTRPLGNVIYLMCGPCTSPEICRRLLTKLYKRLGEFNRT

SEQ ID NO: 122 - protein, 833 aa, Synthetic construct
  source 1..833: note = Arabidopsis thaliana BioDA protein S509A
MIPVTATLIRHRLRHLRHRIRFKSTSVSPFHLPLNHPTYLIWSANTSLGKTLVSTGIAASFLLQQPSSSATKLLYLKPIQTGFPSDSDSRFVFSKLDSLSLRRQIPISISNSVLHSSLPAAKSLGLNVEVSESGMCSLNFRDEKTVTGAPELLCKTLYAWEAAISPHLAAERENATVEDSVVLQMIEKCLKEEMECGVKSEKSDLLCLVETAGGVASPGPSGTLQCDLYRPFRLPGILVGDGRLGGISGTIAAYESLKLRGYDIAAVVFEDHGLVNEVPLTSYLRNKVPVLVLPPVPKDPSDDLIEWFVESDGVFKALKETMVLANLERLERLNGMAKLAGEVFWWPFTQHKLVHQETVTVIDSRCGENFSIYKASDNSSLSQQFDACASWWTQGPDPTFQAELAREMGYTAARFGHVMFPENVYEPALKCAELLLDGVGKGWASRVYFSDNGSTAIEIALKMAFRKFCVDHNFCEATEEEKHIVVKVIALRGSYHGDTLGAMEAQAPAPYTGFLQQPWYTGRGLFLDPPTVFLSNGSWNISLPESFSEIAPEYGTFTSRDEIFDKSRDASTLARIYSAYLSKHLQEHSGVRQSAHVGALIIEPVIHGAGGMHMVDPLFQRVLVNECRNRKIPVIFDEVFTGFWRLGVETTTELLGCKPDIACFAKLLTGGMVPLAVTLATDAVFDSFSGDSKLKALLHGHSYSAHAMGCATAAKAIQWFKDPETNHNITSQGKTLRELWDEELVQQISSHSAVQRVVVIGTLFALELKADASNSGYASLYAKSLLIMLREDGIFTRPLGNVIYLMCGPCTSPEICRRLLTKLYKRLGEFNRT

SEQ ID NO: 123 - protein, 833 aa, Synthetic construct
  source 1..833: note = Arabidopsis thaliana BioDA protein S509F
MIPVTATLIRHRLRHLRHRIRFKSTSVSPFHLPLNHPTYLIWSANTSLGKTLVSTGIAASFLLQQPSSSATKLLYLKPIQTGFPSDSDSRFVFSKLDSLSLRRQIPISISNSVLHSSLPAAKSLGLNVEVSESGMCSLNFRDEKTVTGAPELLCKTLYAWEAAISPHLAAERENATVEDSVVLQMIEKCLKEEMECGVKSEKSDLLCLVETAGGVASPGPSGTLQCDLYRPFRLPGILVGDGRLGGISGTIAAYESLKLRGYDIAAVVFEDHGLVNEVPLTSYLRNKVPVLVLPPVPKDPSDDLIEWFVESDGVFKALKETMVLANLERLERLNGMAKLAGEVFWWPFTQHKLVHQETVTVIDSRCGENFSIYKASDNSSLSQQFDACASWWTQGPDPTFQAELAREMGYTAARFGHVMFPENVYEPALKCAELLLDGVGKGWASRVYFSDNGSTAIEIALKMAFRKFCVDHNFCEATEEEKHIVVKVIALRGSYHGDTLGAMEAQAPFPYTGFLQQPWYTGRGLFLDPPTVFLSNGSWNISLPESFSEIAPEYGTFTSRDEIFDKSRDASTLARIYSAYLSKHLQEHSGVRQSAHVGALIIEPVIHGAGGMHMVDPLFQRVLVNECRNRKIPVIFDEVFTGFWRLGVETTTELLGCKPDIACFAKLLTGGMVPLAVTLATDAVFDSFSGDSKLKALLHGHSYSAHAMGCATAAKAIQWFKDPETNHNITSQGKTLRELWDEELVQQISSHSAVQRVVVIGTLFALELKADASNSGYASLYAKSLLIMLREDGIFTRPLGNVIYLMCGPCTSPEICRRLLTKLYKRLGEFNRT

SEQ ID NO: 124 - protein, 833 aa, Synthetic construct
  source 1..833: note = Arabidopsis thaliana BioDA protein S509H
MIPVTATLIRHRLRHLRHRIRFKSTSVSPFHLPLNHPTYLIWSANTSLGKTLVSTGIAASFLLQQPSSSATKLLYLKPIQTGFPSDSDSRFVFSKLDSLSLRRQIPISISNSVLHSSLPAAKSLGLNVEVSESGMCSLNFRDEKTVTGAPELLCKTLYAWEAAISPHLAAERENATVEDSVVLQMIEKCLKEEMECGVKSEKSDLLCLVETAGGVASPGPSGTLQCDLYRPFRLPGILVGDGRLGGISGTIAAYESLKLRGYDIAAVVFEDHGLVNEVPLTSYLRNKVPVLVLPPVPKDPSDDLIEWFVESDGVFKALKETMVLANLERLERLNGMAKLAGEVFWWPFTQHKLVHQETVTVIDSRCGENFSIYKASDNSSLSQQFDACASWWTQGPDPTFQAELAREMGYTAARFGHVMFPENVYEPALKCAELLLDGVGKGWASRVYFSDNGSTAIEIALKMAFRKFCVDHNFCEATEEEKHIVVKVIALRGSYHGDTLGAMEAQAPHPYTGFLQQPWYTGRGLFLDPPTVFLSNGSWNISLPESFSEIAPEYGTFTSRDEIFDKSRDASTLARIYSAYLSKHLQEHSGVRQSAHVGALIIEPVIHGAGGMHMVDPLFQRVLVNECRNRKIPVIFDEVFTGFWRLGVETTTELLGCKPDIACFAKLLTGGMVPLAVTLATDAVFDSFSGDSKLKALLHGHSYSAHAMGCATAAKAIQWFKDPETNHNITSQGKTLRELWDEELVQQISSHSAVQRVVVIGTLFALELKADASNSGYASLYAKSLLIMLREDGIFTRPLGNVIYLMCGPCTSPEICRRLLTKLYKRLGEFNRT

SEQ ID NO: 125 - protein, 833 aa, Synthetic construct
  source 1..833: note = Arabidopsis thaliana BioDA protein S509I
MIPVTATLIRHRLRHLRHRIRFKSTSVSPFHLPLNHPTYLIWSANTSLGKTLVSTGIAASFLLQQPSSSATKLLYLKPIQTGFPSDSDSRFVFSKLDSLSLRRQIPISISNSVLHSSLPAAKSLGLNVEVSESGMCSLNFRDEKTVTGAPELLCKTLYAWEAAISPHLAAERENATVEDSVVLQMIEKCLKEEMECGVKSEKSDLLCLVETAGGVASPGPSGTLQCDLYRPFRLPGILVGDGRLGGISGTIAAYESLKLRGYDIAAVVFEDHGLVNEVPLTSYLRNKVPVLVLPPVPKDPSDDLIEWFVESDGVFKALKETMVLANLERLERLNGMAKLAGEVFWWPFTQHKLVHQETVTVIDSRCGENFSIYKASDNSSLSQQFDACASWWTQGPDPTFQAELAREMGYTAARFGHVMFPENVYEPALKCAELLLDGVGKGWASRVYFSDNGSTAIEIALKMAFRKFCVDHNFCEATEEEKHIVVKVIALRGSYHGDTLGAMEAQAPIPYTGFLQQPWYTGRGLFLDPPTVFLSNGSWNISLPESFSEIAPEYGTFTSRDEIFDKSRDASTLARIYSAYLSKHLQEHSGVRQSAHVGALIIEPVIHGAGGMHMVDPLFQRVLVNECRNRKIPVIFDEVFTGFWRLGVETTTELLGCKPDIACFAKLLTGGMVPLAVTLATDAVFDSFSGDSKLKALLHGHSYSAHAMGCATAAKAIQWFKDPETNHNITSQGKTLRELWDEELVQQISSHSAVQRVVVIGTLFALELKADASNSGYASLYAKSLLIMLREDGIFTRPLGNVIYLMCGPCTSPEICRRLLTKLYKRLGEFNRT

SEQ ID NO: 126 - protein, 833 aa, Synthetic construct
  source 1..833: note = Arabidopsis thaliana BioDA protein S509K
MIPVTATLIRHRLRHLRHRIRFKSTSVSPFHLPLNHPTYLIWSANTSLGKTLVSTGIAASFLLQQPSSSATKLLYLKPIQTGFPSDSDSRFVFSKLDSLSLRRQIPISISNSVLHSSLPAAKSLGLNVEVSESGMCSLNFRDEKTVTGAPELLCKTLYAWEAAISPHLAAERENATVEDSVVLQMIEKCLKEEMECGVKSEKSDLLCLVETAGGVASPGPSGTLQCDLYRPFRLPGILVGDGRLGGISGTIAAYESLKLRGYDIAAVVFEDHGLVNEVPLTSYLRNKVPVLVLPPVPKDPSDDLIEWFVESDGVFKALKETMVLANLERLERLNGMAKLAGEVFWWPFTQHKLVHQETVTVIDSRCGENFSIYKASDNSSLSQQFDACASWWTQGPDPTFQAELAREMGYTAARFGHVMFPENVYEPALKCAELLLDGVGKGWASRVYFSDNGSTAIEIALKMAFRKFCVDHNFCEATEEEKHIVVKVIALRGSYHGDTLGAMEAQAPKPYTGFLQQPWYTGRGLFLDPPTVFLSNGSWNISLPESFSEIAPEYGTFTSRDEIFDKSRDASTLARIYSAYLSKHLQEHSGVRQSAHVGALIIEPVIHGAGGMHMVDPLFQRVLVNECRNRKIPVIFDEVFTGFWRLGVETTTELLGCKPDIACFAKLLTGGMVPLAVTLATDAVFDSFSGDSKLKALLHGHSYSAHAMGCATAAKAIQWFKDPETNHNITSQGKTLRELWDEELVQQISSHSAVQRVVVIGTLFALELKADASNSGYASLYAKSLLIMLREDGIFTRPLGNVIYLMCGPCTSPEICRRLLTKLYKRLGEFNRT

SEQ ID NO: 127 - protein, 833 aa, Synthetic construct
  source 1..833: note = Arabidopsis thaliana BioDA protein S509L
MIPVTATLIRHRLRHLRHRIRFKSTSVSPFHLPLNHPTYLIWSANTSLGKTLVSTGIAASFLLQQPSSSATKLLYLKPIQTGFPSDSDSRFVFSKLDSLSLRRQIPISISNSVLHSSLPAAKSLGLNVEVSESGMCSLNFRDEKTVTGAPELLCKTLYAWEAAISPHLAAERENATVEDSVVLQMIEKCLKEEMECGVKSEKSDLLCLVETAGGVASPGPSGTLQCDLYRPFRLPGILVGDGRLGGISGTIAAYESLKLRGYDIAAVVFEDHGLVNEVPLTSYLRNKVPVLVLPPVPKDPSDDLIEWFVESDGVFKALKETMVLANLERLERLNGMAKLAGEVFWWPFTQHKLVHQETVTVIDSRCGENFSIYKASDNSSLSQQFDACASWWTQGPDPTFQAELAREMGYTAARFGHVMFPENVYEPALKCAELLLDGVGKGWASRVYFSDNGSTAIEIALKMAFRKFCVDHNFCEATEEEKHIVVKVIALRGSYHGDTLGAMEAQAPLPYTGFLQQPWYTGRGLFLDPPTVFLSNGSWNISLPESFSEIAPEYGTFTSRDEIFDKSRDASTLARIYSAYLSKHLQEHSGVRQSAHVGALIIEPVIHGAGGMHMVDPLFQRVLVNECRNRKIPVIFDEVFTGFWRLGVETTTELLGCKPDIACFAKLLTGGMVPLAVTLATDAVFDSFSGDSKLKALLHGHSYSAHAMGCATAAKAIQWFKDPETNHNITSQGKTLRELWDEELVQQISSHSAVQRVVVIGTLFALELKADASNSGYASLYAKSLLIMLREDGIFTRPLGNVIYLMCGPCTSPEICRRLLTKLYKRLGEFNRT

SEQ ID NO: 128 - protein, 833 aa, Synthetic construct
  source 1..833: note = Arabidopsis thaliana BioDA protein S509M
MIPVTATLIRHRLRHLRHRIRFKSTSVSPFHLPLNHPTYLIWSANTSLGKTLVSTGIAASFLLQQPSSSATKLLYLKPIQTGFPSDSDSRFVFSKLDSLSLRRQIPISISNSVLHSSLPAAKSLGLNVEVSESGMCSLNFRDEKTVTGAPELLCKTLYAWEAAISPHLAAERENATVEDSVVLQMIEKCLKEEMECGVKSEKSDLLCLVETAGGVASPGPSGTLQCDLYRPFRLPGILVGDGRLGGISGTIAAYESLKLRGYDIAAVVFEDHGLVNEVPLTSYLRNKVPVLVLPPVPKDPSDDLIEWFVESDGVFKALKETMVLANLERLERLNGMAKLAGEVFWWPFTQHKLVHQETVTVIDSRCGENFSIYKASDNSSLSQQFDACASWWTQGPDPTFQAELAREMGYTAARFGHVMFPENVYEPALKCAELLLDGVGKGWASRVYFSDNGSTAIEIALKMAFRKFCVDHNFCEATEEEKHIVVKVIALRGSYHGDTLGAMEAQAPMPYTGFLQQPWYTGRGLFLDPPTVFLSNGSWNISLPESFSEIAPEYGTFTSRDEIFDKSRDASTLARIYSAYLSKHLQEHSGVRQSAHVGALIIEPVIHGAGGMHMVDPLFQRVLVNECRNRKIPVIFDEVFTGFWRLGVETTTELLGCKPDIACFAKLLTGGMVPLAVTLATDAVFDSFSGDSKLKALLHGHSYSAHAMGCATAAKAIQWFKDPETNHNITSQGKTLRELWDEELVQQISSHSAVQRVVVIGTLFALELKADASNSGYASLYAKSLLIMLREDGIFTRPLGNVIYLMCGPCTSPEICRRLLTKLYKRLGEFNRT

SEQ ID NO: 129 - protein, 833 aa, Synthetic construct
  source 1..833: note = Arabidopsis thaliana BioDA protein S509N
MIPVTATLIRHRLRHLRHRIRFKSTSVSPFHLPLNHPTYLIWSANTSLGKTLVSTGIAASFLLQQPSSSATKLLYLKPIQTGFPSDSDSRFVFSKLDSLSLRRQIPISISNSVLHSSLPAAKSLGLNVEVSESGMCSLNFRDEKTVTGAPELLCKTLYAWEAAISPHLAAERENATVEDSVVLQMIEKCLKEEMECGVKSEKSDLLCLVETAGGVASPGPSGTLQCDLYRPFRLPGILVGDGRLGGISGTIAAYESLKLRGYDIAAVVFEDHGLVNEVPLTSYLRNKVPVLVLPPVPKDPSDDLIEWFVESDGVFKALKETMVLANLERLERLNGMAKLAGEVFWWPFTQHKLVHQETVTVIDSRCGENFSIYKASDNSSLSQQFDACASWWTQGPDPTFQAELAREMGYTAARFGHVMFPENVYEPALKCAELLLDGVGKGWASRVYFSDNGSTAIEIALKMAFRKFCVDHNFCEATEEEKHIVVKVIALRGSYHGDTLGAMEAQAPNPYTGFLQQPWYTGRGLFLDPPTVFLSNGSWNISLPESFSEIAPEYGTFTSRDEIFDKSRDASTLARIYSAYLSKHLQEHSGVRQSAHVGALIIEPVIHGAGGMHMVDPLFQRVLVNECRNRKIPVIFDEVFTGFWRLGVETTTELLGCKPDIACFAKLLTGGMVPLAVTLATDAVFDSFSGDSKLKALLHGHSYSAHAMGCATAAKAIQWFKDPETNHNITSQGKTLRELWDEELVQQISSHSAVQRVVVIGTLFALELKADASNSGYASLYAKSLLIMLREDGIFTRPLGNVIYLMCGPCTSPEICRRLLTKLYKRLGEFNRT

SEQ ID NO: 130 - protein, 833 aa, Synthetic construct
  source 1..833: note = Arabidopsis thaliana BioDA protein S509Q
MIPVTATLIRHRLRHLRHRIRFKSTSVSPFHLPLNHPTYLIWSANTSLGKTLVSTGIAASFLLQQPSSSATKLLYLKPIQTGFPSDSDSRFVFSKLDSLSLRRQIPISISNSVLHSSLPAAKSLGLNVEVSESGMCSLNFRDEKTVTGAPELLCKTLYAWEAAISPHLAAERENATVEDSVVLQMIEKCLKEEMECGVKSEKSDLLCLVETAGGVASPGPSGTLQCDLYRPFRLPGILVGDGRLGGISGTIAAYESLKLRGYDIAAVVFEDHGLVNEVPLTSYLRNKVPVLVLPPVPKDPSDDLIEWFVESDGVFKALKETMVLANLERLERLNGMAKLAGEVFWWPFTQHKLVHQETVTVIDSRCGENFSIYKASDNSSLSQQFDACASWWTQGPDPTFQAELAREMGYTAARFGHVMFPENVYEPALKCAELLLDGVGKGWASRVYFSDNGSTAIEIALKMAFRKFCVDHNFCEATEEEKHIVVKVIALRGSYHGDTLGAMEAQAPQPYTGFLQQPWYTGRGLFLDPPTVFLSNGSWNISLPESFSEIAPEYGTFTSRDEIFDKSRDASTLARIYSAYLSKHLQEHSGVRQSAHVGALIIEPVIHGAGGMHMVDPLFQRVLVNECRNRKIPVIFDEVFTGFWRLGVETTTELLGCKPDIACFAKLLTGGMVPLAVTLATDAVFDSFSGDSKLKALLHGHSYSAHAMGCATAAKAIQWFKDPETNHNITSQGKTLRELWDEELVQQISSHSAVQRVVVIGTLFALELKADASNSGYASLYAKSLLIMLREDGIFTRPLGNVIYLMCGPCTSPEICRRLLTKLYKRLGEFNRT

SEQ ID NO: 131 - protein, 833 aa, Synthetic construct
  source 1..833: note = Arabidopsis thaliana BioDA protein S509R
MIPVTATLIRHRLRHLRHRIRFKSTSVSPFHLPLNHPTYLIWSANTSLGKTLVSTGIAASFLLQQPSSSATKLLYLKPIQTGFPSDSDSRFVFSKLDSLSLRRQIPISISNSVLHSSLPAAKSLGLNVEVSESGMCSLNFRDEKTVTGAPELLCKTLYAWEAAISPHLAAERENATVEDSVVLQMIEKCLKEEMECGVKSEKSDLLCLVETAGGVASPGPSGTLQCDLYRPFRLPGILVGDGRLGGISGTIAAYESLKLRGYDIAAVVFEDHGLVNEVPLTSYLRNKVPVLVLPPVPKDPSDDLIEWFVESDGVFKALKETMVLANLERLERLNGMAKLAGEVFWWPFTQHKLVHQETVTVIDSRCGENFSIYKASDNSSLSQQFDACASWWTQGPDPTFQAELAREMGYTAARFGHVMFPENVYEPALKCAELLLDGVGKGWASRVYFSDNGSTAIEIALKMAFRKFCVDHNFCEATEEEKHIVVKVIALRGSYHGDTLGAMEAQAPRPYTGFLQQPWYTGRGLFLDPPTVFLSNGSWNISLPESFSEIAPEYGTFTSRDEIFDKSRDASTLARIYSAYLSKHLQEHSGVRQSAHVGALIIEPVIHGAGGMHMVDPLFQRVLVNECRNRKIPVIFDEVFTGFWRLGVETTTELLGCKPDIACFAKLLTGGMVPLAVTLATDAVFDSFSGDSKLKALLHGHSYSAHAMGCATAAKAIQWFKDPETNHNITSQGKTLRELWDEELVQQISSHSAVQRVVVIGTLFALELKADASNSGYASLYAKSLLIMLREDGIFTRPLGNVIYLMCGPCTSPEICRRLLTKLYKRLGEFNRT

SEQ ID NO: 132 - protein, 833 aa, Synthetic construct
  source 1..833: note = Arabidopsis thaliana BioDA protein S509T
MIPVTATLIRHRLRHLRHRIRFKSTSVSPFHLPLNHPTYLIWSANTSLGKTLVSTGIAASFLLQQPSSSATKLLYLKPIQTGFPSDSDSRFVFSKLDSLSLRRQIPISISNSVLHSSLPAAKSLGLNVEVSESGMCSLNFRDEKTVTGAPELLCKTLYAWEAAISPHLAAERENATVEDSVVLQMIEKCLKEEMECGVKSEKSDLLCLVETAGGVASPGPSGTLQCDLYRPFRLPGILVGDGRLGGISGTIAAYESLKLRGYDIAAVVFEDHGLVNEVPLTSYLRNKVPVLVLPPVPKDPSDDLIEWFVESDGVFKALKETMVLANLERLERLNGMAKLAGEVFWWPFTQHKLVHQETVTVIDSRCGENFSIYKASDNSSLSQQFDACASWWTQGPDPTFQAELAREMGYTAARFGHVMFPENVYEPALKCAELLLDGVGKGWASRVYFSDNGSTAIEIALKMAFRKFCVDHNFCEATEEEKHIVVKVIALRGSYHGDTLGAMEAQAPTPYTGFLQQPWYTGRGLFLDPPTVFLSNGSWNISLPESFSEIAPEYGTFTSRDEIFDKSRDASTLARIYSAYLSKHLQEHSGVRQSAHVGALIIEPVIHGAGGMHMVDPLFQRVLVNECRNRKIPVIFDEVFTGFWRLGVETTTELLGCKPDIACFAKLLTGGMVPLAVTLATDAVFDSFSGDSKLKALLHGHSYSAHAMGCATAAKAIQWFKDPETNHNITSQGKTLRELWDEELVQQISSHSAVQRVVVIGTLFALELKADASNSGYASLYAKSLLIMLREDGIFTRPLGNVIYLMCGPCTSPEICRRLLTKLYKRLGEFNRT

SEQ ID NO: 133 - protein, 833 aa, Synthetic construct
  source 1..833: note = Arabidopsis thaliana BioDA protein S509Y
MIPVTATLIRHRLRHLRHRIRFKSTSVSPFHLPLNHPTYLIWSANTSLGKTLVSTGIAASFLLQQPSSSATKLLYLKPIQTGFPSDSDSRFVFSKLDSLSLRRQIPISISNSVLHSSLPAAKSLGLNVEVSESGMCSLNFRDEKTVTGAPELLCKTLYAWEAAISPHLAAERENATVEDSVVLQMIEKCLKEEMECGVKSEKSDLLCLVETAGGVASPGPSGTLQCDLYRPFRLPGILVGDGRLGGISGTIAAYESLKLRGYDIAAVVFEDHGLVNEVPLTSYLRNKVPVLVLPPVPKDPSDDLIEWFVESDGVFKALKETMVLANLERLERLNGMAKLAGEVFWWPFTQHKLVHQETVTVIDSRCGENFSIYKASDNSSLSQQFDACASWWTQGPDPTFQAELAREMGYTAARFGHVMFPENVYEPALKCAELLLDGVGKGWASRVYFSDNGSTAIEIALKMAFRKFCVDHNFCEATEEEKHIVVKVIALRGSYHGDTLGAMEAQAPYPYTGFLQQPWYTGRGLFLDPPTVFLSNGSWNISLPESFSEIAPEYGTFTSRDEIFDKSRDASTLARIYSAYLSKHLQEHSGVRQSAHVGALIIEPVIHGAGGMHMVDPLFQRVLVNECRNRKIPVIFDEVFTGFWRLGVETTTELLGCKPDIACFAKLLTGGMVPLAVTLATDAVFDSFSGDSKLKALLHGHSYSAHAMGCATAAKAIQWFKDPETNHNITSQGKTLRELWDEELVQQISSHSAVQRVVVIGTLFALELKADASNSGYASLYAKSLLIMLREDGIFTRPLGNVIYLMCGPCTSPEICRRLLTKLYKRLGEFNRT

SEQ ID NO: 134 - protein, 833 aa, Synthetic construct
  source 1..833: note = Arabidopsis thaliana BioDA protein S704P
MIPVTATLIRHRLRHLRHRIRFKSTSVSPFHLPLNHPTYLIWSANTSLGKTLVSTGIAASFLLQQPSSSATKLLYLKPIQTGFPSDSDSRFVFSKLDSLSLRRQIPISISNSVLHSSLPAAKSLGLNVEVSESGMCSLNFRDEKTVTGAPELLCKTLYAWEAAISPHLAAERENATVEDSVVLQMIEKCLKEEMECGVKSEKSDLLCLVETAGGVASPGPSGTLQCDLYRPFRLPGILVGDGRLGGISGTIAAYESLKLRGYDIAAVVFEDHGLVNEVPLTSYLRNKVPVLVLPPVPKDPSDDLIEWFVESDGVFKALKETMVLANLERLERLNGMAKLAGEVFWWPFTQHKLVHQETVTVIDSRCGENFSIYKASDNSSLSQQFDACASWWTQGPDPTFQAELAREMGYTAARFGHVMFPENVYEPALKCAELLLDGVGKGWASRVYFSDNGSTAIEIALKMAFRKFCVDHNFCEATEEEKHIVVKVIALRGSYHGDTLGAMEAQAPSPYTGFLQQPWYTGRGLFLDPPTVFLSNGSWNISLPESFSEIAPEYGTFTSRDEIFDKSRDASTLARIYSAYLSKHLQEHSGVRQSAHVGALIIEPVIHGAGGMHMVDPLFQRVLVNECRNRKIPVIFDEVFTGFWRLGVETTTELLGCKPDIACFAKLLTGGMVPLAVTLATDAVFDSFSGDSKLKALLHGHSYPAHAMGCATAAKAIQWFKDPETNHNITSQGKTLRELWDEELVQQISSHSAVQRVVVIGTLFALELKADASNSGYASLYAKSLLIMLREDGIFTRPLGNVIYLMCGPCTSPEICRRLLTKLYKRLGEFNRT

SEQ ID NO: 135 - protein, 833 aa, Synthetic construct
  source 1..833: note = Arabidopsis thaliana BioDA protein T393V
MIPVTATLIRHRLRHLRHRIRFKSTSVSPFHLPLNHPTYLIWSANTSLGKTLVSTGIAASFLLQQPSSSATKLLYLKPIQTGFPSDSDSRFVFSKLDSLSLRRQIPISISNSVLHSSLPAAKSLGLNVEVSESGMCSLNFRDEKTVTGAPELLCKTLYAWEAAISPHLAAERENATVEDSVVLQMIEKCLKEEMECGVKSEKSDLLCLVETAGGVASPGPSGTLQCDLYRPFRLPGILVGDGRLGGISGTIAAYESLKLRGYDIAAVVFEDHGLVNEVPLTSYLRNKVPVLVLPPVPKDPSDDLIEWFVESDGVFKALKETMVLANLERLERLNGMAKLAGEVFWWPFTQHKLVHQETVTVIDSRCGENFSIYKASDNSSLSQQFDACASWWVQGPDPTFQAELAREMGYTAARFGHVMFPENVYEPALKCAELLLDGVGKGWASRVYFSDNGSTAIEIALKMAFRKFCVDHNFCEATEEEKHIVVKVIALRGSYHGDTLGAMEAQAPSPYTGFLQQPWYTGRGLFLDPPTVFLSNGSWNISLPESFSEIAPEYGTFTSRDEIFDKSRDASTLARIYSAYLSKHLQEHSGVRQSAHVGALIIEPVIHGAGGMHMVDPLFQRVLVNECRNRKIPVIFDEVFTGFWRLGVETTTELLGCKPDIACFAKLLTGGMVPLAVTLATDAVFDSFSGDSKLKALLHGHSYSAHAMGCATAAKAIQWFKDPETNHNITSQGKTLRELWDEELVQQISSHSAVQRVVVIGTLFALELKADASNSGYASLYAKSLLIMLREDGIFTRPLGNVIYLMCGPCTSPEICRRLLTKLYKRLGEFNRT

SEQ ID NO: 136 - protein, 833 aa, Synthetic construct
  source 1..833: note = Arabidopsis thaliana BioDA protein T512G
MIPVTATLIRHRLRHLRHRIRFKSTSVSPFHLPLNHPTYLIWSANTSLGKTLVSTGIAASFLLQQPSSSATKLLYLKPIQTGFPSDSDSRFVFSKLDSLSLRRQIPISISNSVLHSSLPAAKSLGLNVEVSESGMCSLNFRDEKTVTGAPELLCKTLYAWEAAISPHLAAERENATVEDSVVLQMIEKCLKEEMECGVKSEKSDLLCLVETAGGVASPGPSGTLQCDLYRPFRLPGILVGDGRLGGISGTIAAYESLKLRGYDIAAVVFEDHGLVNEVPLTSYLRNKVPVLVLPPVPKDPSDDLIEWFVESDGVFKALKETMVLANLERLERLNGMAKLAGEVFWWPFTQHKLVHQETVTVIDSRCGENFSIYKASDNSSLSQQFDACASWWTQGPDPTFQAELAREMGYTAARFGHVMFPENVYEPALKCAELLLDGVGKGWASRVYFSDNGSTAIEIALKMAFRKFCVDHNFCEATEEEKHIVVKVIALRGSYHGDTLGAMEAQAPSPYGGFLQQPWYTGRGLFLDPPTVFLSNGSWNISLPESFSEIAPEYGTFTSRDEIFDKSRDASTLARIYSAYLSKHLQEHSGVRQSAHVGALIIEPVIHGAGGMHMVDPLFQRVLVNECRNRKIPVIFDEVFTGFWRLGVETTTELLGCKPDIACFAKLLTGGMVPLAVTLATDAVFDSFSGDSKLKALLHGHSYSAHAMGCATAAKAIQWFKDPETNHNITSQGKTLRELWDEELVQQISSHSAVQRVVVIGTLFALELKADASNSGYASLYAKSLLIMLREDGIFTRPLGNVIYLMCGPCTSPEICRRLLTKLYKRLGEFNRT

SEQ ID NO: 137 - protein, 833 aa, Synthetic construct
  source 1..833: note = Arabidopsis thaliana BioDA protein T512I
MIPVTATLIRHRLRHLRHRIRFKSTSVSPFHLPLNHPTYLIWSANTSLGKTLVSTGIAASFLLQQPSSSATKLLYLKPIQTGFPSDSDSRFVFSKLDSLSLRRQIPISISNSVLHSSLPAAKSLGLNVEVSESGMCSLNFRDEKTVTGAPELLCKTLYAWEAAISPHLAAERENATVEDSVVLQMIEKCLKEEMECGVKSEKSDLLCLVETAGGVASPGPSGTLQCDLYRPFRLPGILVGDGRLGGISGTIAAYESLKLRGYDIAAVVFEDHGLVNEVPLTSYLRNKVPVLVLPPVPKDPSDDLIEWFVESDGVFKALKETMVLANLERLERLNGMAKLAGEVFWWPFTQHKLVHQETVTVIDSRCGENFSIYKASDNSSLSQQFDACASWWTQGPDPTFQAELAREMGYTAARFGHVMFPENVYEPALKCAELLLDGVGKGWASRVYFSDNGSTAIEIALKMAFRKFCVDHNFCEATEEEKHIVVKVIALRGSYHGDTLGAMEAQAPSPYIGFLQQPWYTGRGLFLDPPTVFLSNGSWNISLPESFSEIAPEYGTFTSRDEIFDKSRDASTLARIYSAYLSKHLQEHSGVRQSAHVGALIIEPVIHGAGGMHMVDPLFQRVLVNECRNRKIPVIFDEVFTGFWRLGVETTTELLGCKPDIACFAKLLTGGMVPLAVTLATDAVFDSFSGDSKLKALLHGHSYSAHAMGCATAAKAIQWFKDPETNHNITSQGKTLRELWDEELVQQISSHSAVQRVVVIGTLFALELKADASNSGYASLYAKSLLIMLREDGIFTRPLGNVIYLMCGPCTSPEICRRLLTKLYKRLGEFNRT

SEQ ID NO: 138 - protein, 833 aa, Synthetic construct
  source 1..833: note = Arabidopsis thaliana BioDA protein T512N
MIPVTATLIRHRLRHLRHRIRFKSTSVSPFHLPLNHPTYLIWSANTSLGKTLVSTGIAASFLLQQPSSSATKLLYLKPIQTGFPSDSDSRFVFSKLDSLSLRRQIPISISNSVLHSSLPAAKSLGLNVEVSESGMCSLNFRDEKTVTGAPELLCKTLYAWEAAISPHLAAERENATVEDSVVLQMIEKCLKEEMECGVKSEKSDLLCLVETAGGVASPGPSGTLQCDLYRPFRLPGILVGDGRLGGISGTIAAYESLKLRGYDIAAVVFEDHGLVNEVPLTSYLRNKVPVLVLPPVPKDPSDDLIEWFVESDGVFKALKETMVLANLERLERLNGMAKLAGEVFWWPFTQHKLVHQETVTVIDSRCGENFSIYKASDNSSLSQQFDACASWWTQGPDPTFQAELAREMGYTAARFGHVMFPENVYEPALKCAELLLDGVGKGWASRVYFSDNGSTAIEIALKMAFRKFCVDHNFCEATEEEKHIVVKVIALRGSYHGDTLGAMEAQAPSPYNGFLQQPWYTGRGLFLDPPTVFLSNGSWNISLPESFSEIAPEYGTFTSRDEIFDKSRDASTLARIYSAYLSKHLQEHSGVRQSAHVGALIIEPVIHGAGGMHMVDPLFQRVLVNECRNRKIPVIFDEVFTGFWRLGVETTTELLGCKPDIACFAKLLTGGMVPLAVTLATDAVFDSFSGDSKLKALLHGHSYSAHAMGCATAAKAIQWFKDPETNHNITSQGKTLRELWDEELVQQISSHSAVQRVVVIGTLFALELKADASNSGYASLYAKSLLIMLREDGIFTRPLGNVIYLMCGPCTSPEICRRLLTKLYKRLGEFNRT

SEQ ID NO: 139 - protein, 833 aa, Synthetic construct
  source 1..833: note = Arabidopsis thaliana BioDA protein T512W
MIPVTATLIRHRLRHLRHRIRFKSTSVSPFHLPLNHPTYLIWSANTSLGKTLVSTGIAASFLLQQPSSSATKLLYLKPIQTGFPSDSDSRFVFSKLDSLSLRRQIPISISNSVLHSSLPAAKSLGLNVEVSESGMCSLNFRDEKTVTGAPELLCKTLYAWEAAISPHLAAERENATVEDSVVLQMIEKCLKEEMECGVKSEKSDLLCLVETAGGVASPGPSGTLQCDLYRPFRLPGILVGDGRLGGISGTIAAYESLKLRGYDIAAVVFEDHGLVNEVPLTSYLRNKVPVLVLPPVPKDPSDDLIEWFVESDGVFKALKETMVLANLERLERLNGMAKLAGEVFWWPFTQHKLVHQETVTVIDSRCGENFSIYKASDNSSLSQQFDACASWWTQGPDPTFQAELAREMGYTAARFGHVMFPENVYEPALKCAELLLDGVGKGWASRVYFSDNGSTAIEIALKMAFRKFCVDHNFCEATEEEKHIVVKVIALRGSYHGDTLGAMEAQAPSPYWGFLQQPWYTGRGLFLDPPTVFLSNGSWNISLPESFSEIAPEYGTFTSRDEIFDKSRDASTLARIYSAYLSKHLQEHSGVRQSAHVGALIIEPVIHGAGGMHMVDPLFQRVLVNECRNRKIPVIFDEVFTGFWRLGVETTTELLGCKPDIACFAKLLTGGMVPLAVTLATDAVFDSFSGDSKLKALLHGHSYSAHAMGCATAAKAIQWFKDPETNHNITSQGKTLRELWDEELVQQISSHSAVQRVVVIGTLFALELKADASNSGYASLYAKSLLIMLREDGIFTRPLGNVIYLMCGPCTSPEICRRLLTKLYKRLGEFNRT

SEQ ID NO: 140 - protein, 833 aa, Synthetic construct
  source 1..833: note = Arabidopsis thaliana BioDA protein V354A
MIPVTATLIRHRLRHLRHRIRFKSTSVSPFHLPLNHPTYLIWSANTSLGKTLVSTGIAASFLLQQPSSSATKLLYLKPIQTGFPSDSDSRFVFSKLDSLSLRRQIPISISNSVLHSSLPAAKSLGLNVEVSESGMCSLNFRDEKTVTGAPELLCKTLYAWEAAISPHLAAERENATVEDSVVLQMIEKCLKEEMECGVKSEKSDLLCLVETAGGVASPGPSGTLQCDLYRPFRLPGILVGDGRLGGISGTIAAYESLKLRGYDIAAVVFEDHGLVNEVPLTSYLRNKVPVLVLPPVPKDPSDDLIEWFVESDGVFKALKETMVLANLERLERLNGMAKLAGEVFWWPFTQHKLAHQETVTVIDSRCGENFSIYKASDNSSLSQQFDACASWWTQGPDPTFQAELAREMGYTAARFGHVMFPENVYEPALKCAELLLDGVGKGWASRVYFSDNGSTAIEIALKMAFRKFCVDHNFCEATEEEKHIVVKVIALRGSYHGDTLGAMEAQAPSPYTGFLQQPWYTGRGLFLDPPTVFLSNGSWNISLPESFSEIAPEYGTFTSRDEIFDKSRDASTLARIYSAYLSKHLQEHSGVRQSAHVGALIIEPVIHGAGGMHMVDPLFQRVLVNECRNRKIPVIFDEVFTGFWRLGVETTTELLGCKPDIACFAKLLTGGMVPLAVTLATDAVFDSFSGDSKLKALLHGHSYSAHAMGCATAAKAIQWFKDPETNHNITSQGKTLRELWDEELVQQISSHSAVQRVVVIGTLFALELKADASNSGYASLYAKSLLIMLREDGIFTRPLGNVIYLMCGPCTSPEICRRLLTKLYKRLGEFNRT

SEQ ID NO: 141 - protein, 833 aa, Synthetic construct
  source 1..833: note = Arabidopsis thaliana BioDA protein V354E
MIPVTATLIRHRLRHLRHRIRFKSTSVSPFHLPLNHPTYLIWSANTSLGKTLVSTGIAASFLLQQPSSSATKLLYLKPIQTGFPSDSDSRFVFSKLDSLSLRRQIPISISNSVLHSSLPAAKSLGLNVEVSESGMCSLNFRDEKTVTGAPELLCKTLYAWEAAISPHLAAERENATVEDSVVLQMIEKCLKEEMECGVKSEKSDLLCLVETAGGVASPGPSGTLQCDLYRPFRLPGILVGDGRLGGISGTIAAYESLKLRGYDIAAVVFEDHGLVNEVPLTSYLRNKVPVLVLPPVPKDPSDDLIEWFVESDGVFKALKETMVLANLERLERLNGMAKLAGEVFWWPFTQHKLEHQETVTVIDSRCGENFSIYKASDNSSLSQQFDACASWWTQGPDPTFQAELAREMGYTAARFGHVMFPENVYEPALKCAELLLDGVGKGWASRVYFSDNGSTAIEIALKMAFRKFCVDHNFCEATEEEKHIVVKVIALRGSYHGDTLGAMEAQAPSPYTGFLQQPWYTGRGLFLDPPTVFLSNGSWNISLPESFSEIAPEYGTFTSRDEIFDKSRDASTLARIYSAYLSKHLQEHSGVRQSAHVGALIIEPVIHGAGGMHMVDPLFQRVLVNECRNRKIPVIFDEVFTGFWRLGVETTTELLGCKPDIACFAKLLTGGMVPLAVTLATDAVFDSFSGDSKLKALLHGHSYSAHAMGCATAAKAIQWFKDPETNHNITSQGKTLRELWDEELVQQISSHSAVQRVVVIGTLFALELKADASNSGYASLYAKSLLIMLREDGIFTRPLGNVIYLMCGPCTSPEICRRLLTKLYKRLGEFNRT

SEQ ID NO: 142 - protein, 833 aa, Synthetic construct
  source 1..833: note = Arabidopsis thaliana BioDA protein V354L
MIPVTATLIRHRLRHLRHRIRFKSTSVSPFHLPLNHPTYLIWSANTSLGKTLVSTGIAASFLLQQPSSSATKLLYLKPIQTGFPSDSDSRFVFSKLDSLSLRRQIPISISNSVLHSSLPAAKSLGLNVEVSESGMCSLNFRDEKTVTGAPELLCKTLYAWEAAISPHLAAERENATVEDSVVLQMIEKCLKEEMECGVKSEKSDLLCLVETAGGVASPGPSGTLQCDLYRPFRLPGILVGDGRLGGISGTIAAYESLKLRGYDIAAVVFEDHGLVNEVPLTSYLRNKVPVLVLPPVPKDPSDDLIEWFVESDGVFKALKETMVLANLERLERLNGMAKLAGEVFWWPFTQHKLLHQETVTVIDSRCGENFSIYKASDNSSLSQQFDACASWWTQGPDPTFQAELAREMGYTAARFGHVMFPENVYEPALKCAELLLDGVGKGWASRVYFSDNGSTAIEIALKMAFRKFCVDHNFCEATEEEKHIVVKVIALRGSYHGDTLGAMEAQAPSPYTGFLQQPWYTGRGLFLDPPTVFLSNGSWNISLPESFSEIAPEYGTFTSRDEIFDKSRDASTLARIYSAYLSKHLQEHSGVRQSAHVGALIIEPVIHGAGGMHMVDPLFQRVLVNECRNRKIPVIFDEVFTGFWRLGVETTTELLGCKPDIACFAKLLTGGMVPLAVTLATDAVFDSFSGDSKLKALLHGHSYSAHAMGCATAAKAIQWFKDPETNHNITSQGKTLRELWDEELVQQISSHSAVQRVVVIGTLFALELKADASNSGYASLYAKSLLIMLREDGIFTRPLGNVIYLMCGPCTSPEICRRLLTKLYKRLGEFNRT

SEQ ID NO: 143 - protein, 833 aa, Synthetic construct
  source 1..833: note = Arabidopsis thaliana BioDA protein V354N
MIPVTATLIRHRLRHLRHRIRFKSTSVSPFHLPLNHPTYLIWSANTSLGKTLVSTGIAASFLLQQPSSSATKLLYLKPIQTGFPSDSDSRFVFSKLDSLSLRRQIPISISNSVLHSSLPAAKSLGLNVEVSESGMCSLNFRDEKTVTGAPELLCKTLYAWEAAISPHLAAERENATVEDSVVLQMIEKCLKEEMECGVKSEKSDLLCLVETAGGVASPGPSGTLQCDLYRPFRLPGILVGDGRLGGISGTIAAYESLKLRGYDIAAVVFEDHGLVNEVPLTSYLRNKVPVLVLPPVPKDPSDDLIEWFVESDGVFKALKETMVLANLERLERLNGMAKLAGEVFWWPFTQHKLNHQETVTVIDSRCGENFSIYKASDNSSLSQQFDACASWWTQGPDPTFQAELAREMGYTAARFGHVMFPENVYEPALKCAELLLDGVGKGWASRVYFSDNGSTAIEIALKMAFRKFCVDHNFCEATEEEKHIVVKVIALRGSYHGDTLGAMEAQAPSPYTGFLQQPWYTGRGLFLDPPTVFLSNGSWNISLPESFSEIAPEYGTFTSRDEIFDKSRDASTLARIYSAYLSKHLQEHSGVRQSAHVGALIIEPVIHGAGGMHMVDPLFQRVLVNECRNRKIPVIFDEVFTGFWRLGVETTTELLGCKPDIACFAKLLTGGMVPLAVTLATDAVFDSFSGDSKLKALLHGHSYSAHAMGCATAAKAIQWFKDPETNHNITSQGKTLRELWDEELVQQISSHSAVQRVVVIGTLFALELKADASNSGYASLYAKSLLIMLREDGIFTRPLGNVIYLMCGPCTSPEICRRLLTKLYKRLGEFNRT

SEQ ID NO: 144 - protein, 833 aa, Synthetic construct
  source 1..833: note = Arabidopsis thaliana BioDA protein V354T
MIPVTATLIRHRLRHLRHRIRFKSTSVSPFHLPLNHPTYLIWSANTSLGKTLVSTGIAASFLLQQPSSSATKLLYLKPIQTGFPSDSDSRFVFSKLDSLSLRRQIPISISNSVLHSSLPAAKSLGLNVEVSESGMCSLNFRDEKTVTGAPELLCKTLYAWEAAISPHLAAERENATVEDSVVLQMIEKCLKEEMECGVKSEKSDLLCLVETAGGVASPGPSGTLQCDLYRPFRLPGILVGDGRLGGISGTIAAYESLKLRGYDIAAVVFEDHGLVNEVPLTSYLRNKVPVLVLPPVPKDPSDDLIEWFVESDGVFKALKETMVLANLERLERLNGMAKLAGEVFWWPFTQHKLTHQETVTVIDSRCGENFSIYKASDNSSLSQQFDACASWWTQGPDPTFQAELAREMGYTAARFGHVMFPENVYEPALKCAELLLDGVGKGWASRVYFSDNGSTAIEIALKMAFRKFCVDHNFCEATEEEKHIVVKVIALRGSYHGDTLGAMEAQAPSPYTGFLQQPWYTGRGLFLDPPTVFLSNGSWNISLPESFSEIAPEYGTFTSRDEIFDKSRDASTLARIYSAYLSKHLQEHSGVRQSAHVGALIIEPVIHGAGGMHMVDPLFQRVLVNECRNRKIPVIFDEVFTGFWRLGVETTTELLGCKPDIACFAKLLTGGMVPLAVTLATDAVFDSFSGDSKLKALLHGHSYSAHAMGCATAAKAIQWFKDPETNHNITSQGKTLRELWDEELVQQISSHSAVQRVVVIGTLFALELKADASNSGYASLYAKSLLIMLREDGIFTRPLGNVIYLMCGPCTSPEICRRLLTKLYKRLGEFNRT

SEQ ID NO: 145 - protein, 833 aa, Synthetic construct
  source 1..833: note = Arabidopsis thaliana BioDA protein W391F
MIPVTATLIRHRLRHLRHRIRFKSTSVSPFHLPLNHPTYLIWSANTSLGKTLVSTGIAASFLLQQPSSSATKLLYLKPIQTGFPSDSDSRFVFSKLDSLSLRRQIPISISNSVLHSSLPAAKSLGLNVEVSESGMCSLNFRDEKTVTGAPELLCKTLYAWEAAISPHLAAERENATVEDSVVLQMIEKCLKEEMECGVKSEKSDLLCLVETAGGVASPGPSGTLQCDLYRPFRLPGILVGDGRLGGISGTIAAYESLKLRGYDIAAVVFEDHGLVNEVPLTSYLRNKVPVLVLPPVPKDPSDDLIEWFVESDGVFKALKETMVLANLERLERLNGMAKLAGEVFWWPFTQHKLVHQETVTVIDSRCGENFSIYKASDNSSLSQQFDACASFWTQGPDPTFQAELAREMGYTAARFGHVMFPENVYEPALKCAELLLDGVGKGWASRVYFSDNGSTAIEIALKMAFRKFCVDHNFCEATEEEKHIVVKVIALRGSYHGDTLGAMEAQAPSPYTGFLQQPWYTGRGLFLDPPTVFLSNGSWNISLPESFSEIAPEYGTFTSRDEIFDKSRDASTLARIYSAYLSKHLQEHSGVRQSAHVGALIIEPVIHGAGGMHMVDPLFQRVLVNECRNRKIPVIFDEVFTGFWRLGVETTTELLGCKPDIACFAKLLTGGMVPLAVTLATDAVFDSFSGDSKLKALLHGHSYSAHAMGCATAAKAIQWFKDPETNHNITSQGKTLRELWDEELVQQISSHSAVQRVVVIGTLFALELKADASNSGYASLYAKSLLIMLREDGIFTRPLGNVIYLMCGPCTSPEICRRLLTKLYKRLGEFNRT

SEQ ID NO: 146 - protein, 833 aa, Synthetic construct
  source 1..833: note = Arabidopsis thaliana BioDA protein W392C
MIPVTATLIRHRLRHLRHRIRFKSTSVSPFHLPLNHPTYLIWSANTSLGKTLVSTGIAASFLLQQPSSSATKLLYLKPIQTGFPSDSDSRFVFSKLDSLSLRRQIPISISNSVLHSSLPAAKSLGLNVEVSESGMCSLNFRDEKTVTGAPELLCKTLYAWEAAISPHLAAERENATVEDSVVLQMIEKCLKEEMECGVKSEKSDLLCLVETAGGVASPGPSGTLQCDLYRPFRLPGILVGDGRLGGISGTIAAYESLKLRGYDIAAVVFEDHGLVNEVPLTSYLRNKVPVLVLPPVPKDPSDDLIEWFVESDGVFKALKETMVLANLERLERLNGMAKLAGEVFWWPFTQHKLVHQETVTVIDSRCGENFSIYKASDNSSLSQQFDACASWCTQGPDPTFQAELAREMGYTAARFGHVMFPENVYEPALKCAELLLDGVGKGWASRVYFSDNGSTAIEIALKMAFRKFCVDHNFCEATEEEKHIVVKVIALRGSYHGDTLGAMEAQAPSPYTGFLQQPWYTGRGLFLDPPTVFLSNGSWNISLPESFSEIAPEYGTFTSRDEIFDKSRDASTLARIYSAYLSKHLQEHSGVRQSAHVGALIIEPVIHGAGGMHMVDPLFQRVLVNECRNRKIPVIFDEVFTGFWRLGVETTTELLGCKPDIACFAKLLTGGMVPLAVTLATDAVFDSFSGDSKLKALLHGHSYSAHAMGCATAAKAIQWFKDPETNHNITSQGKTLRELWDEELVQQISSHSAVQRVVVIGTLFALELKADASNSGYASLYAKSLLIMLREDGIFTRPLGNVIYLMCGPCTSPEICRRLLTKLYKRLGEFNRT

SEQ ID NO: 147 - protein, 833 aa, Synthetic construct
  source 1..833: note = Arabidopsis thaliana BioDA protein W392D
MIPVTATLIRHRLRHLRHRIRFKSTSVSPFHLPLNHPTYLIWSANTSLGKTLVSTGIAASFLLQQPSSSATKLLYLKPIQTGFPSDSDSRFVFSKLDSLSLRRQIPISISNSVLHSSLPAAKSLGLNVEVSESGMCSLNFRDEKTVTGAPELLCKTLYAWEAAISPHLAAERENATVEDSVVLQMIEKCLKEEMECGVKSEKSDLLCLVETAGGVASPGPSGTLQCDLYRPFRLPGILVGDGRLGGISGTIAAYESLKLRGYDIAAVVFEDHGLVNEVPLTSYLRNKVPVLVLPPVPKDPSDDLIEWFVESDGVFKALKETMVLANLERLERLNGMAKLAGEVFWWPFTQHKLVHQETVTVIDSRCGENFSIYKASDNSSLSQQFDACASWDTQGPDPTFQAELAREMGYTAARFGHVMFPENVYEPALKCAELLLDGVGKGWASRVYFSDNGSTAIEIALKMAFRKFCVDHNFCEATEEEKHIVVKVIALRGSYHGDTLGAMEAQAPSPYTGFLQQPWYTGRGLFLDPPTVFLSNGSWNISLPESFSEIAPEYGTFTSRDEIFDKSRDASTLARIYSAYLSKHLQEHSGVRQSAHVGALIIEPVIHGAGGMHMVDPLFQRVLVNECRNRKIPVIFDEVFTGFWRLGVETTTELLGCKPDIACFAKLLTGGMVPLAVTLATDAVFDSFSGDSKLKALLHGHSYSAHAMGCATAAKAIQWFKDPETNHNITSQGKTLRELWDEELVQQISSHSAVQRVVVIGTLFALELKADASNSGYASLYAKSLLIMLREDGIFTRPLGNVIYLMCGPCTSPEICRRLLTKLYKRLGEFNRT

SEQ ID NO: 148 - protein, 833 aa, Synthetic construct
  source 1..833: note = Arabidopsis thaliana BioDA protein W392M
MIPVTATLIRHRLRHLRHRIRFKSTSVSPFHLPLNHPTYLIWSANTSLGKTLVSTGIAASFLLQQPSSSATKLLYLKPIQTGFPSDSDSRFVFSKLDSLSLRRQIPISISNSVLHSSLPAAKSLGLNVEVSESGMCSLNFRDEKTVTGAPELLCKTLYAWEAAISPHLAAERENATVEDSVVLQMIEKCLKEEMECGVKSEKSDLLCLVETAGGVASPGPSGTLQCDLYRPFRLPGILVGDGRLGGISGTIAAYESLKLRGYDIAAVVFEDHGLVNEVPLTSYLRNKVPVLVLPPVPKDPSDDLIEWFVESDGVFKALKETMVLANLERLERLNGMAKLAGEVFWWPFTQHKLVHQETVTVIDSRCGENFSIYKASDNSSLSQQFDACASWMTQGPDPTFQAELAREMGYTAARFGHVMFPENVYEPALKCAELLLDGVGKGWASRVYFSDNGSTAIEIALKMAFRKFCVDHNFCEATEEEKHIVVKVIALRGSYHGDTLGAMEAQAPSPYTGFLQQPWYTGRGLFLDPPTVFLSNGSWNISLPESFSEIAPEYGTFTSRDEIFDKSRDASTLARIYSAYLSKHLQEHSGVRQSAHVGALIIEPVIHGAGGMHMVDPLFQRVLVNECRNRKIPVIFDEVFTGFWRLGVETTTELLGCKPDIACFAKLLTGGMVPLAVTLATDAVFDSFSGDSKLKALLHGHSYSAHAMGCATAAKAIQWFKDPETNHNITSQGKTLRELWDEELVQQISSHSAVQRVVVIGTLFALELKADASNSGYASLYAKSLLIMLREDGIFTRPLGNVIYLMCGPCTSPEICRRLLTKLYKRLGEFNRT

SEQ ID NO: 149 - protein, 833 aa, Synthetic construct
  source 1..833: note = Arabidopsis thaliana BioDA protein Y511C
MIPVTATLIRHRLRHLRHRIRFKSTSVSPFHLPLNHPTYLIWSANTSLGKTLVSTGIAASFLLQQPSSSATKLLYLKPIQTGFPSDSDSRFVFSKLDSLSLRRQIPISISNSVLHSSLPAAKSLGLNVEVSESGMCSLNFRDEKTVTGAPELLCKTLYAWEAAISPHLAAERENATVEDSVVLQMIEKCLKEEMECGVKSEKSDLLCLVETAGGVASPGPSGTLQCDLYRPFRLPGILVGDGRLGGISGTIAAYESLKLRGYDIAAVVFEDHGLVNEVPLTSYLRNKVPVLVLPPVPKDPSDDLIEWFVESDGVFKALKETMVLANLERLERLNGMAKLAGEVFWWPFTQHKLVHQETVTVIDSRCGENFSIYKASDNSSLSQQFDACASWWTQGPDPTFQAELAREMGYTAARFGHVMFPENVYEPALKCAELLLDGVGKGWASRVYFSDNGSTAIEIALKMAFRKFCVDHNFCEATEEEKHIVVKVIALRGSYHGDTLGAMEAQAPSPCTGFLQQPWYTGRGLFLDPPTVFLSNGSWNISLPESFSEIAPEYGTFTSRDEIFDKSRDASTLARIYSAYLSKHLQEHSGVRQSAHVGALIIEPVIHGAGGMHMVDPLFQRVLVNECRNRKIPVIFDEVFTGFWRLGVETTTELLGCKPDIACFAKLLTGGMVPLAVTLATDAVFDSFSGDSKLKALLHGHSYSAHAMGCATAAKAIQWFKDPETNHNITSQGKTLRELWDEELVQQISSHSAVQRVVVIGTLFALELKADASNSGYASLYAKSLLIMLREDGIFTRPLGNVIYLMCGPCTSPEICRRLLTKLYKRLGEFNRT

SEQ ID NO: 150 - protein, 833 aa, Synthetic construct
  source 1..833: note = Arabidopsis thaliana BioDA protein Y511H
MIPVTATLIRHRLRHLRHRIRFKSTSVSPFHLPLNHPTYLIWSANTSLGKTLVSTGIAASFLLQQPSSSATKLLYLKPIQTGFPSDSDSRFVFSKLDSLSLRRQIPISISNSVLHSSLPAAKSLGLNVEVSESGMCSLNFRDEKTVTGAPELLCKTLYAWEAAISPHLAAERENATVEDSVVLQMIEKCLKEEMECGVKSEKSDLLCLVETAGGVASPGPSGTLQCDLYRPFRLPGILVGDGRLGGISGTIAAYESLKLRGYDIAAVVFEDHGLVNEVPLTSYLRNKVPVLVLPPVPKDPSDDLIEWFVESDGVFKALKETMVLANLERLERLNGMAKLAGEVFWWPFTQHKLVHQETVTVIDSRCGENFSIYKASDNSSLSQQFDACASWWTQGPDPTFQAELAREMGYTAARFGHVMFPENVYEPALKCAELLLDGVGKGWASRVYFSDNGSTAIEIALKMAFRKFCVDHNFCEATEEEKHIVVKVIALRGSYHGDTLGAMEAQAPSPHTGFLQQPWYTGRGLFLDPPTVFLSNGSWNISLPESFSEIAPEYGTFTSRDEIFDKSRDASTLARIYSAYLSKHLQEHSGVRQSAHVGALIIEPVIHGAGGMHMVDPLFQRVLVNECRNRKIPVIFDEVFTGFWRLGVETTTELLGCKPDIACFAKLLTGGMVPLAVTLATDAVFDSFSGDSKLKALLHGHSYSAHAMGCATAAKAIQWFKDPETNHNITSQGKTLRELWDEELVQQISSHSAVQRVVVIGTLFALELKADASNSGYASLYAKSLLIMLREDGIFTRPLGNVIYLMCGPCTSPEICRRLLTKLYKRLGEFNRT

SEQ ID NO: 151 - protein, 833 aa, synthetic construct
  source 1..833: note = Arabidopsis thaliana BioDA protein Y511I
MIPVTATLIRHRLRHLRHRIRFKSTSVSPFHLPLNHPTYLIWSANTSLGKTLVSTGIAASFLLQQPSSSATKLLYLKPIQTGFPSDSDSRFVFSKLDSLSLRRQIPISISNSVLHSSLPAAKSLGLNVEVSESGMCSLNFRDEKTVTGAPELLCKTLYAWEAAISPHLAAERENATVEDSVVLQMIEKCLKEEMECGVKSEKSDLLCLVETAGGVASPGPSGTLQCDLYRPFRLPGILVGDGRLGGISGTIAAYESLKLRGYDIAAVVFEDHGLVNEVPLTSYLRNKVPVLVLPPVPKDPSDDLIEWFVESDGVFKALKETMVLANLERLERLNGMAKLAGEVFWWPFTQHKLVHQETVTVIDSRCGENFSIYKASDNSSLSQQFDACASWWTQGPDPTFQAELAREMGYTAARFGHVMFPENVYEPALKCAELLLDGVGKGWASRVYFSDNGSTAIEIALKMAFRKFCVDHNFCEATEEEKHIVVKVIALRGSYHGDTLGAMEAQAPSPITGFLQQPWYTGRGLFLDPPTVFLSNGSWNISLPESFSEIAPEYGTFTSRDEIFDKSRDASTLARIYSAYLSKHLQEHSGVRQSAHVGALIIEPVIHGAGGMHMVDPLFQRVLVNECRNRKIPVIFDEVFTGFWRLGVETTTELLGCKPDIACFAKLLTGGMVPLAVTLATDAVFDSFSGDSKLKALLHGHSYSAHAMGCATAAKAIQWFKDPETNHNITSQGKTLRELWDEELVQQISSHSAVQRVVVIGTLFALELKADASNSGYASLYAKSLLIMLREDGIFTRPLGNVIYLMCGPCTSPEICRRLLTKLYKRLGEFNRT

SEQ ID NO: 152 - protein, 833 aa, synthetic construct
  source 1..833: note = Arabidopsis thaliana BioDA protein Y511K
MIPVTATLIRHRLRHLRHRIRFKSTSVSPFHLPLNHPTYLIWSANTSLGKTLVSTGIAASFLLQQPSSSATKLLYLKPIQTGFPSDSDSRFVFSKLDSLSLRRQIPISISNSVLHSSLPAAKSLGLNVEVSESGMCSLNFRDEKTVTGAPELLCKTLYAWEAAISPHLAAERENATVEDSVVLQMIEKCLKEEMECGVKSEKSDLLCLVETAGGVASPGPSGTLQCDLYRPFRLPGILVGDGRLGGISGTIAAYESLKLRGYDIAAVVFEDHGLVNEVPLTSYLRNKVPVLVLPPVPKDPSDDLIEWFVESDGVFKALKETMVLANLERLERLNGMAKLAGEVFWWPFTQHKLVHQETVTVIDSRCGENFSIYKASDNSSLSQQFDACASWWTQGPDPTFQAELAREMGYTAARFGHVMFPENVYEPALKCAELLLDGVGKGWASRVYFSDNGSTAIEIALKMAFRKFCVDHNFCEATEEEKHIVVKVIALRGSYHGDTLGAMEAQAPSPKTGFLQQPWYTGRGLFLDPPTVFLSNGSWNISLPESFSEIAPEYGTFTSRDEIFDKSRDASTLARIYSAYLSKHLQEHSGVRQSAHVGALIIEPVIHGAGGMHMVDPLFQRVLVNECRNRKIPVIFDEVFTGFWRLGVETTTELLGCKPDIACFAKLLTGGMVPLAVTLATDAVFDSFSGDSKLKALLHGHSYSAHAMGCATAAKAIQWFKDPETNHNITSQGKTLRELWDEELVQQISSHSAVQRVVVIGTLFALELKADASNSGYASLYAKSLLIMLREDGIFTRPLGNVIYLMCGPCTSPEICRRLLTKLYKRLGEFNRT

SEQ ID NO: 153 - protein, 833 aa, synthetic construct
  source 1..833: note = Arabidopsis thaliana BioDA protein Y511Q
MIPVTATLIRHRLRHLRHRIRFKSTSVSPFHLPLNHPTYLIWSANTSLGKTLVSTGIAASFLLQQPSSSATKLLYLKPIQTGFPSDSDSRFVFSKLDSLSLRRQIPISISNSVLHSSLPAAKSLGLNVEVSESGMCSLNFRDEKTVTGAPELLCKTLYAWEAAISPHLAAERENATVEDSVVLQMIEKCLKEEMECGVKSEKSDLLCLVETAGGVASPGPSGTLQCDLYRPFRLPGILVGDGRLGGISGTIAAYESLKLRGYDIAAVVFEDHGLVNEVPLTSYLRNKVPVLVLPPVPKDPSDDLIEWFVESDGVFKALKETMVLANLERLERLNGMAKLAGEVFWWPFTQHKLVHQETVTVIDSRCGENFSIYKASDNSSLSQQFDACASWWTQGPDPTFQAELAREMGYTAARFGHVMFPENVYEPALKCAELLLDGVGKGWASRVYFSDNGSTAIEIALKMAFRKFCVDHNFCEATEEEKHIVVKVIALRGSYHGDTLGAMEAQAPSPQTGFLQQPWYTGRGLFLDPPTVFLSNGSWNISLPESFSEIAPEYGTFTSRDEIFDKSRDASTLARIYSAYLSKHLQEHSGVRQSAHVGALIIEPVIHGAGGMHMVDPLFQRVLVNECRNRKIPVIFDEVFTGFWRLGVETTTELLGCKPDIACFAKLLTGGMVPLAVTLATDAVFDSFSGDSKLKALLHGHSYSAHAMGCATAAKAIQWFKDPETNHNITSQGKTLRELWDEELVQQISSHSAVQRVVVIGTLFALELKADASNSGYASLYAKSLLIMLREDGIFTRPLGNVIYLMCGPCTSPEICRRLLTKLYKRLGEFNRT

SEQ ID NO: 154 - protein, 833 aa, synthetic construct
  source 1..833: note = Arabidopsis thaliana BioDA protein Y520N
MIPVTATLIRHRLRHLRHRIRFKSTSVSPFHLPLNHPTYLIWSANTSLGKTLVSTGIAASFLLQQPSSSATKLLYLKPIQTGFPSDSDSRFVFSKLDSLSLRRQIPISISNSVLHSSLPAAKSLGLNVEVSESGMCSLNFRDEKTVTGAPELLCKTLYAWEAAISPHLAAERENATVEDSVVLQMIEKCLKEEMECGVKSEKSDLLCLVETAGGVASPGPSGTLQCDLYRPFRLPGILVGDGRLGGISGTIAAYESLKLRGYDIAAVVFEDHGLVNEVPLTSYLRNKVPVLVLPPVPKDPSDDLIEWFVESDGVFKALKETMVLANLERLERLNGMAKLAGEVFWWPFTQHKLVHQETVTVIDSRCGENFSIYKASDNSSLSQQFDACASWWTQGPDPTFQAELAREMGYTAARFGHVMFPENVYEPALKCAELLLDGVGKGWASRVYFSDNGSTAIEIALKMAFRKFCVDHNFCEATEEEKHIVVKVIALRGSYHGDTLGAMEAQAPSPYTGFLQQPWNTGRGLFLDPPTVFLSNGSWNISLPESFSEIAPEYGTFTSRDEIFDKSRDASTLARIYSAYLSKHLQEHSGVRQSAHVGALIIEPVIHGAGGMHMVDPLFQRVLVNECRNRKIPVIFDEVFTGFWRLGVETTTELLGCKPDIACFAKLLTGGMVPLAVTLATDAVFDSFSGDSKLKALLHGHSYSAHAMGCATAAKAIQWFKDPETNHNITSQGKTLRELWDEELVQQISSHSAVQRVVVIGTLFALELKADASNSGYASLYAKSLLIMLREDGIFTRPLGNVIYLMCGPCTSPEICRRLLTKLYKRLGEFNRT

SEQ ID NO: 155 - protein, 833 aa, synthetic construct
  source 1..833: note = Arabidopsis thaliana BioDA protein Y520W
MIPVTATLIRHRLRHLRHRIRFKSTSVSPFHLPLNHPTYLIWSANTSLGKTLVSTGIAASFLLQQPSSSATKLLYLKPIQTGFPSDSDSRFVFSKLDSLSLRRQIPISISNSVLHSSLPAAKSLGLNVEVSESGMCSLNFRDEKTVTGAPELLCKTLYAWEAAISPHLAAERENATVEDSVVLQMIEKCLKEEMECGVKSEKSDLLCLVETAGGVASPGPSGTLQCDLYRPFRLPGILVGDGRLGGISGTIAAYESLKLRGYDIAAVVFEDHGLVNEVPLTSYLRNKVPVLVLPPVPKDPSDDLIEWFVESDGVFKALKETMVLANLERLERLNGMAKLAGEVFWWPFTQHKLVHQETVTVIDSRCGENFSIYKASDNSSLSQQFDACASWWTQGPDPTFQAELAREMGYTAARFGHVMFPENVYEPALKCAELLLDGVGKGWASRVYFSDNGSTAIEIALKMAFRKFCVDHNFCEATEEEKHIVVKVIALRGSYHGDTLGAMEAQAPSPYTGFLQQPWWTGRGLFLDPPTVFLSNGSWNISLPESFSEIAPEYGTFTSRDEIFDKSRDASTLARIYSAYLSKHLQEHSGVRQSAHVGALIIEPVIHGAGGMHMVDPLFQRVLVNECRNRKIPVIFDEVFTGFWRLGVETTTELLGCKPDIACFAKLLTGGMVPLAVTLATDAVFDSFSGDSKLKALLHGHSYSAHAMGCATAAKAIQWFKDPETNHNITSQGKTLRELWDEELVQQISSHSAVQRVVVIGTLFALELKADASNSGYASLYAKSLLIMLREDGIFTRPLGNVIYLMCGPCTSPEICRRLLTKLYKRLGEFNRT

SEQ ID NO: 156 - DNA, 2502 bp, Arabidopsis thaliana
  source 1..2502: mol_type = genomic DNA
atgattcccgtgaccgccactcttattcgtcacaggttgaggcacttgcgtcatcgaattaggtttaaatcaacctctgtatcaccattccatttgccgctcaatcatcctacttatttgatttggtctgccaacactagcctgggcaaaactttggtcagtacggggatagcagccagttttctcttacaacaacctagttcatcagcaacaaaactattgtatctcaaacccatccagacaggttttcctagtgattctgactcaagatttgttttttcaaagctcgactcattgtcattgcgaagacaaattcctataagtatctcaaattccgtacttcattcatcactccctgctgctaagtctcttggcctaaatgttgaagtaagcgagtctggaatgtgtagtctcaattttcgggatgagaaaactgttaccggcgctccagagttgttgtgcaagacactttatgcttgggaggctgcaatttcaccccatcttgctgcagagagagaaaacgcaactgttgaagactctgtggttcttcaaatgattgagaagtgcctgaaggaggagatggagtgcggagttaaatctgagaagagtgatctcttgtgtctagtcgaaactgctggcggagttgcttctcctggtccatctggaaccttgcaatgtgacctgtataggccgtttaggctccccggaattctagttggagacggcaggttggggggtatctctggcacaatagcagcctatgagagtctcaagcttcgtggatacgatatcgctgctgttgtcttcgaagatcacggactagttaacgaagtgccacttacatcatatttgaggaataaggtacctgtcctcgtattacctcctgtccctaaagacccttcagacgacttgatcgaatggttcgtggagtccgatggcgtattcaaagcacttaaggagacgatggtattagcgaaccttgaacgtcttgaaaggttgaatggtatggccaaactggctggtgaagtgttttggtggccattcacacagcataagcttgttcaccaagagaccgtaactgtgattgactccagatgtggcgagaatttttctatttataaggcatcagataattcttctttgagtcaacagttcgatgcttgcgcaagttggtggacacaggggcctgaccctacttttcaggctgaattggctcgcgagatgggatacacagcggccaggttcggccatgtaatgttccccgaaaatgtttatgaacctgctcttaaatgtgctgagcttttgttagacggtgtaggaaagggatgggcttcacgcgtatacttctctgataatggctcaaccgcaatagagatcgctttgaagatggcttttaggaaattttgcgttgaccacaacttttgcgaagccacagaggaagagaaacacattgtggttaaggtaattgccctgagaggctcataccacggcgatactttgggtgctatggaggctcaggcgccatcaccatatactggttttcttcagcaaccctggtacacgggccggggcctatttttggatcctccaaccgtttttttgtctaacggttcttggaacatatctttgccggaaagtttctcagaaattgctcctgagtacggcaccttcacaagtcgtgatgaaatcttcgataagtcaagagacgcttcaacacttgcaagaatctattcagcttatctctcaaagcatttgcaggagcattcaggagttaggcagagtgcccatgttggtgcattaatcattgagccggtgattcatggtgcaggaggaatgcatatggtggatcctctatttcagagagtcctcgttaatgaatgtagaaatcgtaagatacctgtcatatttgacgaagtcttcactggtttttggagattgggagtggaaacgacaacagaacttctaggatgcaaacctgatattgcgtgctttgctaagctattgacgggcggtatggtacccttggctgtgacattggctacagatgcagttttcgatagttttagtggtgatagcaaattgaaagctctattgcacggacatagttactctgctcacgccatgggatgcgctaccgcggcgaaggcaatccaatggtttaaagatcctgaaaccaatcacaatatcacatctcaaggcaagaccctcagggaactgtgggacgaagaactagttcagcaaatctcttcacactcagcagtgcaacgcgttgttgtcataggaaccttgtttgctctcgagttgaaggcagacgcaagcaactcagggtacgcttcactctatgctaaatctttattgattatgttgagggaagatggcatctttacacgacctctgggtaacgtgatctacctcatgtgcggtccttgtacgagtcccgaaatatgtagacgactgctgactaaactgtataagcgtttgggtgaatttaatcgtacttaa

SEQ ID NO: 157 - DNA, 2460 bp, Zea mays
  source 1..2460: mol_type = genomic DNA
atggttagacgcctgtttcttcaccatgctcggaggagattgcattcaggtaccgcatcaagtattcctctttctactcctatatttgcgatattcggggctaatacgggcgtaggaaagacgttagtcagtgctgggttggctactgcactattatcttctccatcccctgcagtttcaagtgttgcttacttgaagccactacaaactggctatcctgtggactcagacgcgagctttgtattctctaggacaccagctttacttagagcatttccaccttgccgtgccaccaggctcatagctagttgtcgtacattcttccaatcaccagctgtcgaagctaaagcagagtcattgcatgaatcacaggaaaaagtggtgacgtacggcgcaggggctgcagagcagactaaggtcctggcatgctgtacagcttacgcctggcgagagccggtctccccacacctagcagccgagagagagggcatggctgctggcgatgatgaagtaaagggatgtgtggaacaatggctattggaagagggtatcggtgaaggtggagaggtgtggaaaatactggagactgctggtggtgtagctagccctagcgcttctggtacgttacaatgtgatctctataggccatttcgtcttcctgcaattcttgtaggtgatggacgattggggggtattagttctactttgtcagcctatgaaacacttctcttgaggggctatgatgtctcagccgtcatcctggaagaccgtgagttatctaatgataagtttcttctgtcataccttaggaatcgtgttcatgttttaatcttgccccaaataccagaggatccacttgatgacttgaccgattggttcagtgaatcttcaagcatatttatatttttaaaagatgaattgcaaagtttccattcaagacgtattgaaagacttaatagcatgcaaaggaagagtaaagcgttgctgtggtggccatttacccagcacaacttggttccccaggattctgttacagttattgatagcagatatggtgaaaatttctccgtttacaagattaaggataagatgcttatacctcaattcgatgcatgcgctagttggtggactcaaggtcctgactccaatcttcaaattgagcttgctagagatatgggatatgctgctgctagatatggtcatgttatgtttcctgagaatgttcatgaacctgctctccatagtgctgaggtactcctcggtggtgtgggaaagggttgggcgagccgtgtttattatagcgataatgggagcaccgctattgagatcgctttaaaaatggcatttaggaaattttctttagaccacggtatcatggcttcatctgaaaactctactcgcaacgaaagaaatattcaactcaaagttttagcactaaatggatcttatcacggtgatacgcttggagcaatggaagcgcaagctccgtccgcttacaccagtttcctccaacagccttggtacagcggtaggggactttttctcgaccctccaaccgtatatattaagtcagaggtgtataacatttccttgcctcaatctatgcagcatgatccacaaacatatgggtttttttcacaggccgaagttttttgcaagacacgagataagacatttgcggctgatctgtattcatcttatataaagcaaaaattgtcagagttttctctttcctcatcatcagagcatttagccgccttgattattgaacctgttatacaaggggctggcggtatgctgatgattgatccgttattccagagagtgcttgtttcagaatgtagatcaaggaagatacctgttatttttgatgaggtctttacgggattctggcgtctaggtgttgagagcgcgtccgagcttcttggatgcctacctgatatcgcttgttacgccaagcttatgactggggggattatcccattagccgctactcttgctactgaggaggtttttgaaagtttcgagagcgactcaaaattgaccgccctcctgcatgggcactcttatactgcacatgcaatgggatgtactgcagctttaaaagctatgcagtggtataggggaccaagcacgaattcaaacttggatacagatcatatgaaattaaaggaattatgggacggcactctggtcaaacaactctccagcctgcctaacgtgaaaagagttgtctcacttgggactctttgtgcaatagagctaaaagcagaaggtgctgatgcgggatatgcttcactttacgcttcaagtttagtacaacaattaaggaaggaagatgatatctacattcgcccacttgggaatgtcatttaccttatgtgcggaccttgtaccccacgtgatagttgcacacgtcagcttctcaaggtccatagaagattgtgcgctctcaactaa

SEQ ID NO: 158 - DNA, 2580 bp, Nannochloropsis gaditana
  source 1..2580: mol_type = genomic DNA
atgtgcagcctcaccatacaagtatttggggctaatactgatgtgggaaaaacagttataagtgcagggttgttgcgtgctgctagtaacagaccgcttagaagaaggactacgtacattaagcctctccagactggaaagattcatgatgggtctttcgtgcaacgctacacctcagcagatgttagttgccacactctttactcctgggaaactcctttatctccccacgtggccgctacaaaggaaggaaaaacaatatcctctgaagaacttctcggaatgttgcgtacatgtcttcagcaggcccaagagtcacacacagtcggtggagatggagggggggttagacagagagagggttcaaatgtgggcgatttggtcgtggtagagacagctggaggtgttttgagtccaggaccgtcaccactccaaacacaggctgatctttataggccgttgagattgccagtgctacttgtaggggatgggagacttggtggaatttcttccactcttgctgcttatgaaagcttgtactgtcgaggctatgaggttcacgctattgcagtgctagaagttccacactacattgagaatgctgctgcagtatccgagtacattacaggtactttgggtcatgccgagacacctgttctgagcctaccacatttgccagaagtttcatctgttagtttttctaccggagacgttgacaaggatgtgctccttggaggtcttgatcagtggtatcatcaacacgaacacgtctttcaccatcttttagacacattgattgatagggaacgagtcaggattcaaagactccagaagatgactacccaagcagcacaagtgttttggtatcctttcactcaacatagtggactctctggcactgatttacatgtggttgattcagcttatggagataactacactctcataagcaaatcatccgaagatggtgacgcaaaagaaagagttccatgcagcaggacactcattgatgcttgtgcaagctggtggacacagggcctcggacacggcagggttgacgttgctcttgccgtcggtgcagctgcaggacgattcggacacgttatattcccagggaatgtccacgaaccggccctgagactagcggagcttatgctggctggacccggtcagggatgggccagcagggttttcttctctgataacgggtctactgcaatggaaattgccgtgaaaatggcacttaagaagaactcagtggacttgaagtacgagaaggggtgctccaaggaggagttcagagttgaacaaccaaatgataaaatttcagccacgcctttgaccgtagtgacccagagggattgctaccacggcgatactttgggttgtatggacgctgctgctccaaccatcttcaacacgggtcagcatccatggtaccaaccacggactctgagcctgacagttcctactttcggctatgtatctggccacttgcaagttgagataccgccagaaatcacaagagcagccgggcaaagtgctcttcagttacctgattccggccaggtactcaagttccctggcggtttggcaacattactcgatgttcatgctagggaaggaagtgatgccgctgttatttatagaaaagcaatacgagctcagttcattgcatttgaacgtggtgaggaaggaattctttcttccaatactgttattccgcttcggggtgaggccggacaaggtcatagatgtcgaaaactcggtgcagtgttgctagagcccgtattaatgggagccgccggtatggtgatggtggatccgctcttccaaaggatattaactcttgaaggacgcgcctatggtctccccgtggtttttgacgaaatagcctcagggctgtataggctaggatgcgcctccgctgctgaacttctcggagtggccccggatattgcttgttatggtaaaaccctgaccggcggctatttgcccatggctttgactttaacaactgaagctgtattcgaagctttccatggtactaacaaatctgatgctttgctccatggacatagttacaccgctaatccacttggttgcgctgcagcggtccatgcacttaaggcatatgcagtgatacatgagacgaacattagaacgtctcaggagtgctgtcaacgtaaggaagattttttccctaataaaaataaatgcagtagtcatcacaatatatgcagatacaatgaggatcaagtggctgctctttctaatctcagcggagttcgaagagctgtagcgcttggaacagttcttgctgtggaactgacagaggtggaatcctctaaccgcaaagggtacagttctacagcatctacacacatcgtgaatgatttgcgggaagccgggatttatgctagacctctcggtaatgttgtctacttgatagcatctcaggttagttccggtggaactttcgaatgcttggtggatacattggatcgtgtgttgagaaggcgtggagatactttgggtaagtttacgcacgacatgaccacttctggtgtagtgatctga

SEQ ID NO: 159 - protein, 429 aa, Escherichia coli
MTTDDLAFDQRHIWHPYTSMTSPLPVYPVVSAEGCELILSDGRRLVDGMSSWWAAIHGYNHPQLNAAMKSQIDAMSHVMFGGITHAPAIELCRKLVAMTPQPLECVFLADSGSVAVEVAMKMALQYWQAKGEARQRFLTFRNGYHGDTFGAMSVCDPDNSMHSLWKGYLPENLFAPAPQSRMDGEWDERDMVGFARLMAAHRHEIAAVIIEPIVQGAGGMRMYHPEWLKRIRKICDREGILLIADEIATGFGRTGKLFACEHAEIAPDILCLGKALTGGTMTLSATLTTREVAETISNGEAGCFMHGPTFMGNPLACAAANASLAILESGDWQQQVADIEVQLREQLAPARDAEMVADVRVLGAIGVVETTHPVNMAALQKFFVEQGVWIRPFGKLIYLMPPYIILPQQLQRLTAAVNRAVQDETFFCQ

SEQ ID NO: 160 - protein, 669 aa, Cryptosporidium andersoni
MPNIFITATDTDVGKTTISALLCLHYGYSYHKVIQSGDLENSDSMTISQLVPNVKIYPEQIKLRKSLSPNLSAEFENKEISLSDFNFDLLSQDNVIIEGVGGILVPLSDKLDVIDLMEYFGMITLLVVPSRLGIINQARMALNLLKNRNINTIGFVTNGEYRPDDFNVISRLTNTNHLFHIPTMEIINHESLKSLKIPTDLFCSIEKDKYLGICKKIFEYNTNNQLSYLNLCERDSKIIWHPYTQHGIESEFKCFISGSGSFLIDDEGNKWLDLISSWWVITFGHCDKKLSEAITKQVKTLDHIVFAGYTHEPAIKLAEILLDLNSQYFHKVFYSDNGSTAIEVALKAVIHYHQNRGQRNRINWLALEGGYHGDTFGAMSVGYSSNYFKPYYEFLFQKIHFIPYPESYDDTTEEQWQIDCELSLNKAKYIISSIGKENIAGIMIEPLIQGASGMRQTRPEFLNKLLSICKDNEIIVIFDEVFTGFGRTGTLFAYQQLKYIPDILCLSKGITGGVLPLSVTLFPQYIYDAFVSDNISTAFIHGHSFTANPISCSAAIANLSRINNENTFALIQKINNANSAFILELKKKFEDRIYNYFTKGPLCVFSLKDKYKNYGLNFNIIIKRCLERKYLIIRPLGNRIYLLPPYEIDIETLQQAHKLIIEALFELNI

SEQ ID NO: 161 - protein, 431 aa, Agrobacterium tumefaciens
MSRSPVWHPFTQHGLEPPMKRVVSAEGAFLVDEDGNRLFDGISSWWVITHGHRHPAIMAAIRAATEAFDQVIFAEFSHEPAETLARGLIGLAPNGLSHVFYSDSGSTAVEVALKMALGYFHNRGEKRDRIVVMEHGYHGDTIGTMSTGERGVFNAAYKPLLFGVDRLAFPQAGGEQQTLDMFESFCRSGRIAALLIEPLVLGAGGMKMYGADILAGLKQIAERHGCLVIADEVMTGWGRTGTLFACEQAGISPDILCTSKGLTGGSLPLAATLCSAEIFDAHFSTDRRKTFFHSSSYTANPIACAAAVANLQVWRDEPVLQRIGQLQQMLRDNLRRFADDRRFTGIRQMGTIAALDLVVPAGGYLAEAGPRMRQLFRERGFVIRPLGNVLYLMPPYCSTGEDLTSAFDAIDEVAGIVTETASLKSRAAGIA

SEQ ID NO: 162 - protein, 429 aa, Citrobacter portucalensis
MTTDDLAFDQRHIWHPYTSMTSPLPVYPVARAEGCELILASGEKLIDGMSSWWAAIHGYNHPQLNAAMKTQIDAMSHVMFGGITHAPAIALCRQLVAMTPEALECVFLADSGSVAVEVAMKMALQYWQAKGESRQRFLTFRNGYHGDTFGAMSVCDPDNSMHSLWKGYLPENLFAPAPQSRMGGEWDELDMVPFARLMAAHRHEIAAVILEPIVQGAGGMRMYHPEWLKRIRKMCDREGILLIADEIATGFGRTGKLFACEHADITPDILCLGKALTGGTMTLSATLTTRQVAETISNGEAGCFMHGPTFMGNPLACAVASASLSLIETGEWRAQVAAIEAQLRAELAPAVDSCWVADVRVLGAIGVIETTHPVNMAALQKFFVEQGVWIRPFGKLIYLMPPHIIQPNQLRRLTQAVNEAVRNATFFSD

SEQ ID NO: 163 - protein, 428 aa, Cedecea sp. nfix57
MTPDDLAFDQRHIWHPYTSMSQPLPVYPVVAGSGCELQLDDGRMLVDGMSSWWAAIHGYNHPRLNQAMKAQIDSMSHVMFGGITHPPAVELCRKLVAMTPAPLECVFLADSGSVAVEVAMKMALQYWHAKGQPRQRFLTFRNGYHGDTFGAMSVCDPDNSMHSLWQGYLPEHLFAPAPKCGFGDEWDEMDIVPFARLMAAHREEIAAVILEPVVQGAGGMRFYHPEWLRRLRRMCDREGILLIADEIATGFGRTGKLFACDHAGISPDIMCLGKALTGGTMTLSATLATRHVAETISDGEAGCFMHGPTFMGNPLACAVASESLALLAEGDWQQQVPAIEHQLREGLLPLTANENVADVRVLGAIGVVETRRPVDMAALQRFFVEQGVWIRPFGRLIYLMPPYIISPEQLEKLILAVTQAVKNPEFFR

SEQ ID NO: 164 - protein, 422 aa, Xenorhabdus sp. xeno-1
MNSSDLEFDLRHIWHPYTSMTHPLPTYPVISAAGVELELSDGRRLIDGMSSWWAAIHGYNHPVLNEAAKSQIDRMSHVMFGGITHPPAIELCQQLVAMTPAALECVFLADSGSVAVEVALKMALQYWQAKGEKRHRFLTLRHGYHGDTFGAMSVCDPDNSMHNLYKGYLPNHLFADAPQSRFEGEWQPEDITSFRQLLLQHHNEIAAVILEPIVQGAGGMRIYHPEYLRQVRKLCDEYQILLIADEIATGFGRTGKLFACEHAQIEPDILCLGKALTGGYMTLSATLTTRHVAETISQGEAGCFMHGPTFMGNPLACAVASANLKLLSDSQWQPRIQSIETQLKVELLPLKSHTTVKDVRVLGAIGVVEMKQPVDMASLQRRFVQHGVWIRPFGRLIYLMPPYITRSEQLSKLTNAINDVII

SEQ ID NO: 165 - protein, 451 aa, Methanobrevibacter olleyae
MMNKSEKCVEKDLAHIWHPASQMKDYEDFPPIVIDHGKGVKLVDVDGKEYIDIISSWWCNLLGHCNDEVNDALKEQVNKLDHVLFANFSHKTIIELSERLIKVMPKGLNKFSFVDNGSASVECALKMAFQYCGQNGKEYKTRFMCFTDAYHGETLGALSVGALDDYSKVFEPIMIDTIKIQAPDCYRCQHNKNRDSCDCECFEDAEEQFSKYGHETCAMIIEPLIQGSAGMKIYPPLYLKKLRAICDKYDVLLIADEIATGFGRTGKMFAVDHAGISPDIMCISKGLTNGYMAMAVCASTDEIYNGFYGDFTDNVAFMHSHTYAGNPLAASVANATLKIMERDKIIEKANEKAIWLNNRFHEIFDSHPNIGEIRQMGLINAIELVEDKDSKKDFDSRERIGYKIYREALKQGLMLRPLGNVMYFNPPLVITKEELEKSLKICKESIDKVLL

SEQ ID NO: 166 - protein, 448 aa, Bacillus subtilis
MKQSMIEKSKKHLWLPFTQMKDYDEDPLIIESGNGIMLKDISGKEYYDGFSSVWLNVHGHRKKEMDEAIQKQLEKIAHSTLLGMTNVPATELAEMLTGITPEKLTRVFYSDSGAEAMEIALKMAFQYWKNIGRPEKQTFISMQNGYHGDTIGAVSVGSIELFHHVYGPLMFESYKAPIPYVYRSESGDPVQCRDECLHALEQLLAKHHEEIAALTIESMVQGASGMIVMPEGFLAGVRKLCTAYDVLMIVDEVATGFGRTGKMFACEHENVQPDLMAAGKGITGGYLPIAVTFATEAIYEAFYDDYDKMKTFFHGHSYTGNQLGCAAAIENLRLFESERIVEQVAEKSKTAAEFLHDLKQLSHVGDVRQLGFMCGIELVQDKGTKQPYPPEKRMGYKVSLKMRELGMLTRPLGDVIAFLPPLASTTDQLQAMISIMKEAIAEVTGRGF

SEQ ID NO: 167 - protein, 430 aa, Pantoea ananatis
MFTSQDAEFDRQHIWHPYTSMQQPLPCYPVVAAKDYHLQLADGRTLVDGMSSWWAAIHGYNHPRLNRALQQQMGQMSHVMFGGITHPAAVALCRQLVSMTPDALECVFLADSGSVAVEVAMKMALQYWLGRGETRQQFLTLKRGYHGDTFAAMSVCDPDNSMHSLWRGYLPEHHFAAAPQCGFDDEWDARDAEDFIRLIQQHRGQLAAVILEPIVQGAGGMRFYHPRYLQCVREACDRHGILLIADEIATGFGRTGTLFACEHAAISPDIMCVGKALTGGTMSLAATLTTRDVADTISLSPAGCFMHGPTFMGNPLACAVASESLAMVQEGDWRQQVAAIERQLRGALLPLRHAPAVADVRVLGAIGVVETHQPVNMAALQQFFVSQGVWIRPFGRLIYLMPPYIISPEALDKLVNAIGAALEQPAHFLS

SEQ ID NO: 168 - protein, 448 aa, Bacillus licheniformis
MNQSFVEKSKQYLWLPFTQMKDYDENPLIIESGQGIKLKDIDGRVYYDGFSSVWLNVHGHRKKELDEAIKKQLGKIAHSTLLGMTNVPATELAEVLIKITPENLTRVFYSDSGAAAMEIALKMAFQYWKNIGKPEKQKFISMKNGYHGDTIGAVSVGAIELFHHVYGPLMFESFKVNVPYVYRSKSGNPDECRDECLAELERLLSERHDEIAAMSVESIVQGASGMIVMPEGYLAGVRELCTKYDVLMIVDEVATGFGRTGKMFACEHERVQPDLMAAGKAITGGYLPIAVTFATEEIYEAFYDDYNKLKTFFHGHSYTGNQLGCAVALENLRLFESEKIVAQVAEKSKILESLFHDLAALPHVGDIRQLGFMSGIELVQSKETRQPYPPEERIGYRVSLKMRELGMLTRPLGDVVAFLPPLASTADDLRAMVSIMKEAIQEVTGRAY

SEQ ID NO: 169 - protein, 434 aa, Streptomyces hygroscopicus
MPEPLTPGELLALDRQHVWHPYGPMPGKAAPLLVESASGVRLRLAEPVEGQDELVDGMSSWWSAVHGYNHPVLNDAAHGQLERMSHVMFGGLTHEPAVRLAKRLVDISPEPLQHVFLADSGSVSVEVAVKMCLQHWRSLGKPRKQRLLTWRGGYHGDTWQPMSVCDPDGGMHELWQGALPRQIFADAPPAGFDAAPDEAYAAHLRELIGRHAEELAAVIVEPVVQGAGGMSFHSPAYLRVLREACDEHGVLLVFDEIATGFGRTGALFAAEHAGVAPDVMCLGKALTGGYLTLAATLCTTAVADGISHGALPVLAHGPTFMGNPLAAAVADASISLLLSQDWGQEVKRIETGLRNGLAPAADLPGVREVRVLGAIGVVQLDHEVDMAAATRAAVQEGVWLRPFRDLIYTMPPYITGDDDVARISAAVCAAAREG

SEQ ID NO: 170 - protein, 426 aa, Streptomyces viridochromogenes
MPDLSVPELLALDRRHVWHPYGPMPGRIDPLVVESASGVRLKLAGGSGELVDGMSSWWSAIHGYNHPVLNEAAHEQLSRMSHVMFGGLTHEPAVRLAKLLVDMSPDGLEHVFLADSGSVSVEVAVKMCLQYWRSLGRPGKQRLLTWRGGYHGDTWQPMSVCDPEGGMHELWTGVLQRQVFADPPPAVYDESYSDHLRSLIERHAHELAAVIVEPVVQGAGGMRFHSPAYLRVLREACDAHDVLLVFDEIATGFGRTGALFAADHAAVTPDVMCMGKALTGGYLTLAATVCTSRVADGISRGEVPVLAHGPTFMGNPLAAAVACASIELLLGQDWLAEVKRIEAGLREGLAPVADLPGVRDVRVLGAIGVVQLDHAVDMKAATDAAVREGVWLRPFRDLIYTMPPYVTGDADLARIARAVCAAAREG

SEQ ID NO: 171 - protein, 463 aa, Stenotrophomonas maltophilia
MLADPTPSPLAHHWRQRDLQVLWHPCTQMREHPDTLPLVPIARGEGAWLIDHDGNRYLDAVSSWWTNLFGHAEPRIGGAIAAQATQLEQVMLAGFGHEPAITLAERLLALAPRQPGREPLAKVFYADNGSAGVEVALKMAFQYFQNRGESRRTRFIALENGYHGETLGALALGDIPLYRRVYAPLLAEALFAPSPDAYLAEPGQSAADRARQAADGLATLFDQHPGEICAVILEPRLQCAGGMRMHDPVYLQRVRELCDAHGAFMIADEIATGFGRTGTLFACEQAGVMPDLMCLSKGLTGGFLPLAAVLATQALYDAFLDDSRERAFLHSHSYTGNPLACAAALTTLDIFRDDDVIARNRSIASVMGTLAAPFNDHPHVADVRQAGMVVAFELSRDGNKRTPFDPAMRLGLHAYKAALKRGVVLRPLGDVLYWMPPYCVDDEQLELLAHTTLAAIDEAIACA

SEQ ID NO: 172 - protein, 468 aa, Pseudomonas fluorescens
MGLNNQWMQRDLAVLWHPCTQMKDHEQLPLIPIKRGEGVWLEDFEGKRYLDAVSSWWVNVFGHANPRINQRIKDQVDQLEHVILAGFSHQPVIELSERLVKMTPEGLNRVFYADNGSSCIEVALKMSFHYWLNRGMPAKKRFVTLTNSYHGETMAAMAVGDVPLFTETYKALLMDTIKVPSPDCYGRPEGMSWEEHSRNMFAAMEQTLAENHDSVAAVIVEPLIQGAGGMRMYHPVYLKLLREACDRYGVHLILDEIAVGFGRTGTMFACEQAGIRPDFLCLSKALTGGYLPLAACLTTDDVYSAFYDDYPTLRAFLHSHSYTGNPVACAAALATLDIFEQDNVIESNKALAQRMASATAHLVDHPNVSEVRQTGMVLAIEMVKDKATKEAYPWQERRGLKVFQHALERGALLRPLGSVVYFLPPYVITPEQIDFLAEVASEGIDIATRDSVSVAVPKDFHPGFRDPG

SEQ ID NO: 173 - protein, 455 aa, Bacillus thuringiensis
MIREITDLQARDLRHIWHPCSQMKDYEAFPPIVIKKGQGVWLYDEHDKRYLDAVSSWWVNLFGHANPRISQALSHQAFTLEHTIFANFTHEPAIQLAEKLVALSPPGLHKVFFADNGSSAVEVALKMSFQYHMQTGKQTKTRFLAFTDAYHGETVGALSVGGVGLYNEVFEPLLLDTVRAQGPDCFRCPFQKLPESCDAPCSHFVEEQLKMHHEEITAVIIEPLIQAAAGMKMYPPIYLQRLRALCSQYDVHLIADEIAVGFGRTGTMFACEQASITPDFMCLSKGITGGYLPLSAVLTSDQVYNAFYDEYGTMKAFLHSHSYSGNTLACRVALEVLTIFEEEQIMDMIQRKGQQMRQLAMEAFGHMPYVGEYRQVGLVGAIELVADRQTKTPFASEERIGYQIYQQALEKGLLIRPLGNILYFMPPYIITNEEMTFMINTTKETIEQFFKDRGE

SEQ ID NO: 174 - protein, 435 aa, Candidatus midichloria mitochondrii
MINLAKIDKQIIWHPITQDKIADLPVIIKEGMGPYLIGQDNKKYLDLISSWWVNLYGHANPHIAKAIYEQALKLEQVIFAGFSHEPAINLCMGLQKILPQPLKRFFFSDNGSSATEIAIKMAFQYWFNQKDYNKKSYISFAGGYHGDTIGAMSVGQSPLHRTFGALLFKNHHIPFPQTWDGDLDVELKEEISLNALQEIIKKHKDEIIALMVEPLVQGANGMQICRPSFLEEICKLTREAGILVIFDEVMTGFGRTGKNFAFEHIDFVPDIICLSKGLTGGFLPLALTIATEKIFEAFLGNNMQVAFTHSHSYTANPLGCAAAIASLELLVKAETTENISTIKEAHTIGLQKLLATEAKLEKFRQIGTIAAFDMVLPDDLDLFKVALSLRRKFIEAGYIIRPLGKTLYLLPPYCTSAQELEQFYENISAIIAEEF

SEQ ID NO: 175 - protein, 433 aa, Thiofilum flexile
MDWVQIDRQHVWHPFTQEQTAPLPVEISSAQGAWLYAKEGQRFLDLISSWWVNLHGHAHPTIAAAIAQQAQTLEQVMFAGFTHQPAAELAYELVQRLPTGLTRVFYSDNGSTAIEVALKIALQYWRNQGQQRKRFAVFDGSYHGDTVGAMSVGQGSQFFTHYQALLFQVDVLPYPLTWERDPHVEQKEAVALQAFDAYLQRHAHEVAGILIEPLVQGASGMRMCRPQFLQGLSQRAKAAGVLLLFDEVMTGFGRTGQWFASQTAQVTPDIICLSKGITAGFLPLSVTVCSETVYQAFLGETFDRAFVHGHSFTANPLGCAAALASLQVFKTENTLAKLPQIEHWHRQQLEWLLQHPKVEQVRICGTIAAFNVKATETGYASSVSEHLRTFFMERGILLRPLGNTVYLLPPYCITEDELISGYQVIERALDALI

SEQ ID NO: 176 - protein, 446 aa, Panacibacter microcysteis
MELAAKDRLYVWHPFTPQKDMIAPVPIVKGKDTLLIDESGNTYIDAISSWWVTLHGHGNEYIAKKIYTQALKLEQVIFAGFTHEPAVELAEKLIRILPAGFAKVFYSDNGSTSTEVALKMALQYWWNTKTEGKAVDTENSPPDGVTRSHNKRNKILAFRNSYHGDTFGAMSVSDRSVFTLAFHDLLFEVTFIDTPSKENLRQSLDLINRQGNEIAAFIYEPLVQGAGGMKMYDAGLMNELLATVKRYDIICIADEVMTGFGRTGKLFASEFLAHKPDIICLSKGLTGGTMALGVTASTDSIYQAYVNDDKLKTFFHGHSFTANPLACTAAIASLELFEQYSVQDKIAWLAKENEQFGKRLQSNYGSICRNIRVLGTILAFDLAIGRNEYLNNIAGVVTDMAMKAGVYIRPLGNVVYIMPPYCITAYELEKVYNTIEAIISSISTNA

SEQ ID NO: 177 - protein, 423 aa, Spirosoma linguale
MNDLAERDRAVIWHPFTQMQTAPLPIPIVRGSGSVLYGADGREYLDMVSSWWVNIHGHAHPHIAQRVSEQLHTLEHVIFAGFTHQPAVELAERLLAILPANQSKVFYSDNGSTAVEVALKMAFQYWHNLGKPRKKIVAFENAYHGDTFGAMAVSGRSAFTAPFTPFLFDVVYLPVPIPGQEEIVLQQAEALFSEEVAAFIAEPLVQGAGGMVMYQPDVLDTLFRLARDKGALIIADEVMTGFGRTGKLFASDYLAEKPDMMCLSKGLTGGTMALGVTSCAESIYNAFLSDDKHKTLFHGHSFTANPLACTAALASMDVLLLSETQANIERITASHAAFANKLAAYPTVENIRQHGTLLAFDIKAGEQTSYFNNIRDTAYNFLLDRGILMRPLGNVLYMMPPYCTTDEQLAYTHEQIQAFLATL

SEQ ID NO: 178 - protein, 433 aa, Prochlorococcus marinus
MKSQISTNINQDWHPHIWPPFTQITNSKPQIEVTHGKNALIYTKNPQQELIDGISSWWVTLHGHSNDYIANAIFHQAKTLEQIIFADFLHPQAKLLSERLSSLTKLERLFFSDNGSTAVEVALKIAYQSWQNQGEIRNQIIAFDGAYHGDTFGAMALGERNIFNENFDNLMFPVKRVPWPSTWIDDEKVKIKEKQAIQILNNLLKKPTVAVIIEPLVQGAGGMNMVRPEFIKKVSEVVKNNNSLLIADEVLTGFGRCGSLFAFQKANIIPDLISISKGLTGGFLPMGITLAKETIFQAFISDSPKKTFWHGHSFTANPLGCAAANASLDLLENDPVKYISFEAKHSYHLKKIKKLPFVKNIRFTGTIAAFDIEIGNNEGYLNNIGKKIKALAIKKGLFIRPLGNVIYLLPPLCITDKQLEKSYRIIFEILSDL

SEQ ID NO: 179 - protein, 458 aa, Chitinophaga polysaccharea
MQQKRCWTYLHSIDRYKPFCTNFAPAQKQATMQTKSLSARDLDVIWHPYTQMQTAPAPIGMVRGQGALLFDENDQSYIDATSSWWVNIHGHAHPHIAQHLAAQALQLEHCIFAGYTHPPAVNLAERLLQVLPGNQRRVFYSDNGSTAIEVALKMAIQYWDNQGIRKRKILAFNNAYHGDTFGAMSVSGRSVFTRVFDDLLFDVYFIDVPNAANLSQLIATIDALQPEDIAAFVFEPLLQGSGGMIMYEADAFDQLLQYCKSRNILLIADEVMTGFGRTGKNFAMEYLQTMPDMICLSKGLTGGTMALGVTTSTAAIYEAFLSNDKLKTLFHGHSFTANPLACTAALASMDLFMDPACAANRQRIHEKHQAFLQELQPIAVVKHPRLLGTILAFEISTTNADGYTNSLADELHRFFRARRIMLRPLGNTLYILPPYCITNEQLEQVYQSIRELLKKLKA

SEQ ID NO: 180 - protein, 416 aa, Chitinophaga filiformis
MLWYPYTQMRQINELPKMVSGEGVMMHLEDGRSLIDGISSWWAVIHGYNHPALNAALLTQANKFAHVMLGGMTHNPALDLAAKLVSITPQGLNHVFFSDSGSIGVEVALKMSIQYWKNIGYNGKSKIISLRNGYHGDTFKAMEVSDDSDFTRAFSDVLRRGYILDIPEGGFDADAALVKQATDKLEALLRREHHNIAAFIVEPIVQCAGGFNIYSPLYLKAARELCTKYNVLFVFDEVATGFGRTGKLFAAEHAGVTPDIMILGKALTAGYMGHAATLATSAVFDSFLGDNYEKALMHGPTFMANPLACAVALRSISIIEDEQYLQKIAKIQSIIREQFDTFSSPAIVAKRSIGAIGALEMKDAACLSGFKEFSQQRGVWLRPIGNVLYLMPPYIISEKELLTILQVIKDWIQQIK

SEQ ID NO: 181 - protein, 421 aa, Pedobacter hartonius
MTLTQRDAESIWHPYTQQLNARPPLPVLSGKGAYLYDEEGCRYIDAVSSWWVTLHGHSHPYIVERVTAQLQQLDQVIFAGFTHEPAIALAENLLAILPEGQKKVFYTDNGSTAVEVALKMCVQYWFNKGKSRKKVLAFNNGYHGDTFGAMSVSGRSAWTAPFDNLLFEVIFIDTPTEENLPVLKEIISVHAAELACFVYEPLVQGSAGMLMYEAPALDQLMAHCLEEGVLMIQDEVFTGFGRTGKNFAADHLKTQPDVMCFSKGLTGGTMPLGVTTCTEDIYNAFLSEDKLKTLFHGHSFTANPLACTAALASIELLLQHEAQDNIRRICNRHAEFSLKICGHQKVAAVRQTGTIIAIEWQTESGTSYFSKLRNLLYDYFMDKGILMRPLGNVIYILPPYCISDEDLKKIYQEIQNALEIF

SEQ ID NO: 182 - protein, 424 aa, Fluviicola sp xm-24bin1
MSDLISKDQQHVWHPFTQHHTAGDPLPIVKAEGVYLYDESGKSYIDANASWWVNTHGHGHPHIGKALSEQFQTVDHIVFAGATHPKAVELAERICGHLPDHFQKVFFSDNGSTAVEIALKMAIQYWHNKGENKQRFLAMHGSYHGDTFGAMSVGQRGYFNAPFEPLFFDTDYLDFPNGSNESEILERAESLLSSGDFAGLIVEPLVQGAAGMRMYAPEFLDQLTAIAQKHGVLVIFDEVMTGFGKTGKLFSMDHCQNKPDFVALSKGLTAGVMALGLTVTSDKIYEAFLGEETTKALLHGHSFTANPIACSVACANLDLFEREETWQNIDAMVQWNQAFAEELTQFDFVVNIRQQGTILAFEIQESGEASYFSDLKTRAYEFFLERGVLLRPLGNVIFVNPPFCITEEEFGKVKEVILSFLKSL

SEQ ID NO: 183 - protein, 423 aa, Flavobacterium foetidum
MGLVEKDSQYLWHPYTQHKTASAPIAITKAEGALFWDENNKEYIDAIASWWVNPFGHSNKTIADAIYKQLTTLEHVLFGGFTHEPAVKVAEKLMEILPKNQKKIFFSDNGSTAVEVAIKVALQFFFNKGEKKTTIIAFENAFHGDTFAAMAASGISFYTMAFQGMFIDVVRVPVPVKGKEQASFDALEEVIKKHNCAGFIFEPLVQGAAGMVMYEPEALDKLIKICKKNNILTIADEVMTGFGKTGKNFAMDHATEQPDMICLSKALTGGTIPMAITTFTQDIFEAFYDDDINKALFHGHTFTANPTGCAAALASIDLLQTPEMQENITRIHKSHLLFQEKIEKHPKVITARTLGVIFAVEIKSDSEETYYGSMRTKLYNFFIENGVVLRPVGNIVYILPPYIMTDKQLEKVYKTIEEAIEMV

SEQ ID NO: 184 - protein, 433 aa, Chroococcidiopsis sp. CCMEE 29
MSVEEIHPSYPIWHPSTQMKTSPPPLKVVKGQGVMLELEDGRQILDCISSWWVTIHGHSHPILANALYQQAQQLEHVIFAGFTHEPAEQLARKLLNHLPKSLTRVFFSDNGSTAVEVALKMAYQYWYNQGETQRTSFIGFEGGYHGDTLGAMSVGGSTSWWQTFQLLMFSIDVVPFPATFDRDPNVEAHEAQSLETITRLLKQNPDRYAGIFIEPLVQGAAGMRLCRPQFLQELESLARSFDVLLIYDEVMTGFGRTGEFFACLKSATTPDILCLSKGLSGGCLPLAVTLATEDIYRAFYSDDIHKAFLHGHSYTGNPLACATGVASLELLEQNPEFRAIEHQHRYYLEKWLIGHPKVEQLRTCGTIAAMEVRTEDQSSYFNAIGPTLRSRFLEEGFLLRPLGNTIYIMPPYCITPNQLESIYQAIRRVLDTL

SEQ ID NO: 185 - protein, 421 aa, Tenacibaculum adriaticum
MNLTERDKKHLWHPLTQHQLYPNHLAITKAKGAILYDDKNNEYIDGIASWYTCMYGHCNEYITSSVYKQMQQLDHVVFAGFTHEPAIKLSEELIKILPENQEKVFFSDNGSTSVDVAIKMALQYHFNQGEKKGKIIALEDGFHGDTFGAMSVSGLSVYNGPFEDFFIDVARIPVPTQENFEHVKEEFIKLITEHNVAAFVYEPLVQGAAAMKMFDGNLLNELIKIAQENNVLAIADEVMTGFGKTGKNFASEYLEHKPDIICLSKSLTAGLVPMAITSCSQKVYNAFLSDDIGKGFFHGHTYSANPVACSAALAGIELLQSEEIQGNIQRIIKSHQEFDSKIKKHPKVKSTRQKGIIYALDLNVEMERYGDLRYKLFNFFMENGVCLRPLGNTIYILAPFVITNEQLEKIYKTIEKALEIL

SEQ ID NO: 186 - protein, 660 aa, Pseudobacteriovorax antillogorgiicola
MSYKLFVTGTDTDVGKTFVSQSLLIGALRQEFDLSYWKPVQTGHPDSDLASIKKQIPDLKARPTSFVYKEPASPDQAASLELRPAPRLEQLLEELQQIQENTLIEGAGGLLVPLNEDNETWLSFLKKAGIPCIVVARTGLGTLNHTALTLRTLDLHNVPVAAVILSGKKHEANERSLSRMFPEHRFLHLDSIEDTHSSSYTEACQRLWCDLTASAVSSPSSLLALDQKHCWHPYTQHKGAATPLEIKRAEGPWLHVSTGEKLIDGTSSWWSNTIGHGRPEIAEAIFKQQQTIDHIIFAGATHEGAVKLSQRLSQLTEHQFPRVFFTDNGSCAVEVGLKIAAQMAFNRGDKGRTKFLSLEGAYHGDTFGAMSVGGTEGFHGPFSPFQFESLKIKPVTAHPSAICPEGAAARETEIQKLKALFSSCGHELAAVVLEPMVQGASGMNMHDLTWLRSLVAIAKDHQVPVIFDEVFTGLGRCGAWFAYQKAGVEPDIICLAKGLTGGNLPLAVTMTTDRIFEQFYSDDKRKALYHGHTYTANAICCAAANATLDIYEREDLIKRSAEIESRFKSWIKQHEAELGLAQARAMGSILAWEIPGSGLGDYFNPIAARVPEEARKFGLFLRPLGNTMYFLPALTITDEELSFCLNALEKTVRAISSYNA

SEQ ID NO: 187 - protein, 448 aa, Texcoconibacillus texcoconensis
MTDANKVMELSKEYLWLPFTQMKDYEKDPLIIEEGEGIKLKDIYGKEYYDGYSSLWVNVHGHRKQEIDDAVKEQLDRIAHSTLLGATNVPATLLAERLIQISPPNLQRVFYSDSGAEAIEIALKMAFQYWYNNGNEKKTKFVTFSDGYHGDTVGAISVGAVDLFHKIYNPLMFNSFKVPFPDTYRHPSDDPQEVMRESLSALKETLDKHHEEIAGLIMESKIQGAGGMKIMTDGFFKEVENLCRTYGILLIVDEVATGFGRTGKMFAVEHEEIRPDIMTVAKGITGGYLPIAATITSEEVHQAFYDDYTKLKTLFHGHSYTGNQLGCAAALANLDLFEKENIVASVEQKASVVQEALKPVAEQAGVGDVRQLGLMCGIELSKDKITKEPFPFEERMAYHTTLTMRKNGMLTRPLGDTVIFMPPLAAEESDLKAMVGIIEKSIEETITD

SEQ ID NO: 188 - protein, 418 aa, Nitrobacter sp. 62-13
MPASPVWHPFTQHAVQPDAIPIARGEGAWLETVDGRRIFDAISSWWVVTHGHRHPRIVQAIKQQAERLDQVIFAGFTHEPAERLARLLVAMTPPGLDHVFFSDSGSTAVEVALKMALGFWRNSGERRSRILALEGAYHGDTIGGMSVGERGVFNATYDPLLFDVERIPFPAAGREQVTLDAITTACRNAGVAALIVEPLILGAGGMLIYPPWVLTEMKRICEAHGVLLIADEVMTGWGRTGTRFACEQAGVTPDIACYSKGLTGGSLPLAVTLCRAAIFDAHYSTDRSKTFFHSSSYTANPIACAAACANLEIWQDEPVMERIAAIARAHTRGLDRFRGDARFANVRQIGSIAALDIVTDDAGYLAGIGPRLYDNFLRRGLLVRPLGNTIYLMPPYCSTPQELERVFDAIGEIVDGIG

SEQ ID NO: 189 - protein, 433 aa, Wigglesworthia glossinidia
MNINEVNFDRYYIWHPYSSITKPLKTYHVVSAKKCKLKLINGKKLIDGMSSWWTVIHGYNHPKINQAIINQIKKVSHVMFGGITHSPAIKLCKKIIKLTPKGLECVFLSDSGSVSIEVALKMALHYWFSKNERKKVKFLSLRGGYHGDTFGALSVCDPKNSMHNIYQGYLPNQEFTNTFDRKFNEKWESGDDLNLVKLIEKHHKKLAAVIIEPIVQGVGGMNFYHKQYLISIKKLCKFYKILLIVDEIATGFGRTGKLFACNYSKITPDILCIGKALTGGAITLAATITKRKVSETICNKKTPEFMHGPTFMANPLSCAASCANLSLIEEGKWIQQVKFIYQEMCKYLYPLIEHSYVKDVRILGAIGVVETKFFVNLENIQNWFVRHGAWIRPFRKLIYLIPPYIISSYELKFLIKLISLSLNDDKNFLYIKN

SEQ ID NO: 190 - protein, 428 aa, Methylomarinum vadi
MQTLTTEQLLNLDRQHIWHPYTSIPARHPLYPVESASGVKLTLADGRELIDGMASWWSAIHGYNEPRLNAAAHRQIDILPHVMFGGLTHSPAVELVERLLAITPEALNRVFLCDSGSVSVEVALKMAIQYWQAQGKTAKSRFLALRGGYHGDTFGAMSVCDPVNGMHHLFSEVLPQNFFAPRPQSRFGGDWVADDINAAETIIAEHAGQIAAVILEPIVQGAGGMWFYHPNYLSEMRKLCDRYQVLLIADEIATGFGRSGRLFACEHAGIVPDILCLGKALTGGYLTLAATLTTENIAETISAGEAGCFMHGPTFMGNPLACSVAAASIDLLLDSDWQANIVRIEQRLTTGLAPCRNLPGVADVRVLGAIGVVEMREAVDVPQLQEKLIEHGVWLRPFGRLVYTMPPYIITDEQLNALTTAVYRSLAG

SEQ ID NO: 191 - protein, 431 aa, Flocculibacter collagenilyticus
MKTNQQFDLEHIWHPYTSMLKPLPTYQVKQAKGVFIELETGEQLIDGMSSWWSIIHGYNHPVLNQAIHEQTAKMAHVMFGGLTHQPAIDLCRKLVEIAPDGLNKVFLADSGSVAVEVALKMAIQYWRGKNKPQKNKMVALKHGYHGDTFGAMSVCDPENSMHTIYSDILPNHYFVEAPKTQFDENLPSDNLVNDVAAMTQLLQHHHDDIAAVILEPIVQGAGGMRMYHPAYLASVKQLCEQYDVLLIADEIATGFGRTGQLFGCHHAHITPDIMCVGKALTGGYLSLAATLCTDEVAMGVSTGDAGVLMHGPTFMGNPLACSVANASLNLLESSNWQSSVSHIEQQLKQSLIPLASLKKVHDARVLGAIGVIEMEESVDVADVQKRFIRHGVWVRPFGKLIYIMPPFVISNSELTVLINAMVTVVTELSES

SEQ ID NO: 192 - protein, 427 aa, Leptolyngbya ectocarpi
MHPLSTDQLLAIDRQHVWHPYAAMPNSLPIFPVKSAHGVHIELEDGRTLVDGMSSWWTCIHGYNHPRLNRAAREQMERMSHVMFGGLTHQPAVQLAQKLVDLTPEPLQQVFFCDSGSVSVEVAMKMAIQYWYNLGQPEKHRFLTVRGGYHGDTFDAMSVCDPVNGMHHLFNQVLRQQYFADVPKIPFWGVWEDTDIASFEQHLVENSGQIAAAIFEPVVQGAGGMRFYSPDYVRRARELCDQYGVLLILDEIATGFGRTGQLFACDHANIAPDILCVGKALSGGFMSLAATLTTPHISQVFAQGGSGVFMHGPTFMGNPLACAVALENISILESYDWRAQIQRIESQLKAELAPCRESSLVKDVRVLGAIGVVELHEPVDMAVIQPQCVDHGVWLRPFGRLVYTMPPYIIEPADLSRITQAMVALTR

SEQ ID NO: 193 - protein, 432 aa, Psychrosphaera aestuarii
MNKKTTTHTTIDINFDKEHIWHPYTSMTNPLPCYPVKSAEGVYIELEDGTKLIDGMSSWWSVIHGYNNEHINEAISSQLKKMSHVMFGGLTHEPAVNLAKHLVELTPDGLNKVFLADSGSVSIEVALKMAIQYQLGKGHIGRNRFIALKHGYHGDTFGAMAVCDPLNSMHSLYSGMMPQNYFIDSPTSKPTDSFQHNELAELADVLECRSDTVAALIIEPIVQGAGGMRFYHPDYLSGAKKLCEKYGVLLIADEIATGFGRTGKMFACEHANITPDILCVGKAITGGYMTLAAAICTDEVAITLSNSRAGVLMHGPTFMGNPLACAAANASMELLKAGTWENQVKNINRILNQELNSANQLERVTEARVFGAIGVIEMKEAVDVASIQKQFVDKGIWVRPFGKLIYVMPPYIISEIELTELLQKMLLVVKSL

SEQ ID NO: 194 - protein, 455 aa, Fragilariopsis cylindrus
MSSPIDLIQKLDQEHVWHPYAAMPNSDPCFPIKSASGCDIHLMDGRTLTDGMSSWWACIHGYNHPIMNQAAKDQIDKMSHMMFGGLTHEPAVSLAKTLADTLPANQTCQNENERLDKVFFSDSGSVSVEVAMKMALQYHYNLIHTGASSSTTTTTTSSRPRKSKFLTIRGGYHGDTFEAMSVCDPVNGMHHLFQSIIPEQIFCSRPEIKFDEPWDEIDIQEVSRTMEDRHDEIAAVILEPIVQGAGGMRFYSPQYLHRLRELCDEYNILLIFDEIATGFGRTGKLFAMDHAPGVLPDILCVGKALSGGFLSFAATITSLKIANVFSQGPAGVLMHGPTFMANPLACAVSNASLDILKSYDLPKMIGSIEKQLIEELEPCKESPFVQDVRVLGGIGVVEMKEPIDMKVMQSKIVEEGVWLRPFGKLLYTMPPFIIQKHELRKITKVMVSIATRRIR

SEQ ID NO: 195 - protein, 430 aa, Deferrisoma camini
MPELSFDWIAFDREHLWHPYTAVESPVPVFPVVGARGVRLELADGRTLIDGMASWWSAIHGYNVPELNRAAAEQLERMSHVMFGGLTHPPAAELGRLLVEITPEPLDRVFFCDSGSVAVEVAIKMALQYWQARGRPEKRRLLTIRQGYHGDTFGAMAVCDPDTGMHRIWRGILPQHLFAPAPRCRFGQPWDEGDIAEFRRLIREHRHEVAAVILEPVVQGAGGMWFYSPQYLRRVRELCDEHEVLLIADEIATGFGRTGRLFACEHADVAPDILCVGKALTGGYLTLAATLTTTRVAQGICSGEPGVFLHGPTFMANPLACAVAAASVRLLLEGPWQERVARIGQGLRQGLAPCAALPGVRDVRVLGAIGVVELEEPVDMGRVQPRFVEEGVWVRPFGRLVYVMPPYVISPQDLAFLTAAICRVVAEIGG

SEQ ID NO: 196 - protein, 426 aa, Chlorobaculum tepidum
MTIDLDFDRCHLWHPYTSMADPLPVWPVKRASGVMIELEDGRKLIDGMSSWWAAIHGYNHPVLNRAVTEQLGRMSHVMFGGLTHEPAIELGKILTSLLPDPLDRIFFCDSGSVAVEVAIKMALQYWLAAGKPGKKRLLTVRSGYHGDTFMAMSVCDPVTGMHSLFSGAVPEQLFVEAPACGFNEPWREEAIDKMRQALEDHANTIAAVIIEPIVQGAGGMRFYSPHYLRRLRELCTEHGVLLIFDEIATGFGRTGKLFAMEYASVTPDIVCLGKALTGGYMTLAATVTTGHVADTISGGNPGLFMHGPTFMANPLACAVAVASLKLLLSGDWQSTVWRIERQLAEELAPCTGMTGVRDVRVLGAIGVVELDRPVDMAKIQQAFVERGIWVRPFGRLVYLMPPFIIRDNELTRLTSVICEVIGAEYR

SEQ ID NO: 197 - protein, 423 aa, Chlamydia pneumoniae
MDKQSSGNSGCIWHPFTQSALDSTPIKIVRGEGAYLYAESGTRYLDAISSWWCNLHGHGHPYITKKLCEQAQKLEHVIFANFTHEPALELVSKLAPLLPEGLERFFFSDNGSTSIEIAMKIAVQYYYNQNKAKSHFVGLSNAYHGDTFGAMSIAGTSPTTVPFHDLFLPSSTIAAPYYGKEELAIAQAKNVFSESNVAAFIYEPLLQGAGGMLMYNPXGLKEILKLAKHYGVLCIADEILTGFGRTGPLFASEFTDIPPDIICLSKGLTGGYLPLALTVTTKEIHDAFVSQDRMKALLHGHTFTGNPLGCSAALASLDLTLSPECLQQRQMIERCHQEFQEAHGSLWQRCEVLGTVLALDYPAEATGYFSQYRDHLNRFFLERGVLLRPLGNTLYVLPPYCIQEEDLRIIYSHLQDALCLQPQ

SEQ ID NO: 198 - protein, 421 aa, Pedobacter psychrophilus
MSDLVSRDLEAIWHPYTQMKTAAKPIPIVKGEGVYLYTEDGKKLIDAVSSWWVNIHGHSHPYIAEKVFEQLQVLEHVIFAGFTHPQAVKLAENLLSIIPKNQAKIFYSDNGSTAVEVAIKMCLQFWSNQNQHRTKILAFKNSYHGDTFGAMAVSARSAFTAAFDSLLFDVEFLDLPNENNLEVLKSQISNLKSELACFIFEPLVQGAGGMLMYEAEDLDELILHCKKENVLTIADEVMTGFGRTGKLFASDHLTQKADLMCFSKGLTGGTMPLGVTSCTQEIYDAFLSDDKLKTLFHGHSFTANPVACAASNASFDILMQAETHESLKRISKKHHQFKEEIELNPKVKNVRQCGTILAMEWNIEATSYFNNIRDTLYNFFLDKGIILRPLGNILYIMPPYCISNDDLDYIYNQIREALIKF

SEQ ID NO: 199 - protein, 422 aa, Pseudopedobacter saltans
MQSELIERDRKVNWHPYTQMKTARHIPIIRGEGAYIFDANGKRYIDAVSSWWVTLHGHAHPYIAKKVAEQLNTLEQVIFAGFTHPVAIELSERLLNLLPDNQEKVFYTDNGSTAVEVALKMCIQYGHNQGVRKNKILAFKNGYHGDTFGAMSVSGRGLWTAPFGELLFDVLFIDAPTKENLSGTKSFIEKHASEIACFIYEPLVQGAGGMLMHEADDLSELMKFCRSKGILLIQDEIFVGFGRTGKLFAANHLSAQADIMCFSKGLTGGTMPLGITTSSQKIYDAFYSNDKTKALFHGHSFTASPLACAAALASMDLLLQEETQQNIQRICKQHQQFVNTLVKHPKIKNVRQQGTIFALEWKIEEDTSYFSDMHDILYPFFLQRGILMRPLGNIIYLVPPYCISQQDLEYIYFCILDALETL

SEQ ID NO: 200 - protein, 40 aa, synthetic construct
  source 1..40: note = Mitochondrial signal peptide (MTP)
MSVSCCCRNLGKTIKKAIPSHHLHLRSLGGSLYRRIQSSS

SEQ ID NO: 201 - protein, 469 aa, synthetic construct
  source 1..469: note = Escherichia coli BioA protein with MTP
MSVSCCCRNLGKTIKKAIPSHHLHLRSLGGSLYRRIQSSSMTTDDLAFDQRHIWHPYTSMTSPLPVYPVVSAEGCELILSDGRRLVDGMSSWWAAIHGYNHPQLNAAMKSQIDAMSHVMFGGITHAPAIELCRKLVAMTPQPLECVFLADSGSVAVEVAMKMALQYWQAKGEARQRFLTFRNGYHGDTFGAMSVCDPDNSMHSLWKGYLPENLFAPAPQSRMDGEWDERDMVGFARLMAAHRHEIAAVIIEPIVQGAGGMRMYHPEWLKRIRKICDREGILLIADEIATGFGRTGKLFACEHAEIAPDILCLGKALTGGTMTLSATLTTREVAETISNGEAGCFMHGPTFMGNPLACAAANASLAILESGDWQQQVADIEVQLREQLAPARDAEMVADVRVLGAIGVVETTHPVNMAALQKFFVEQGVWIRPFGKLIYLMPPYIILPQQLQRLTAAVNRAVQDETFFCQ

SEQ ID NO: 202 - DNA, 1290 bp, Escherichia coli
  source 1..1290: mol_type = genomic DNA
atgactactgatgatcttgcttttgatcaaagacatatttggcatccatatacttctatgacttctccacttcctgtttatcctgttgtttctgctgaaggatgtgaacttattctttctgatggaagaagacttgttgatggaatgtcttcttggtgggctgctattcatggatataatcatccacaacttaatgctgctatgaagtctcaaattgatgctatgtctcatgttatgtttggaggaattactcatgctcctgctattgaactttgtagaaagcttgttgctatgactccacaaccacttgaatgtgtttttcttgctgattctggatctgttgctgttgaagttgctatgaagatggctcttcaatattggcaagctaagggagaagctagacaaagatttcttacttttagaaatggatatcatggagatacttttggagctatgtctgtttgtgatcctgataattctatgcattctctttggaagggatatcttcctgaaaatctttttgctcctgctccacaatctagaatggatggagaatgggatgaaagagatatggttggatttgctagacttatggctgctcatagacatgaaattgctgctgttattattgaaccaattgttcaaggagctggaggaatgagaatgtatcatcctgaatggcttaagagaattagaaagatttgtgatagagaaggaattcttcttattgctgatgaaattgctactggatttggaagaactggaaagctttttgcttgtgaacatgctgaaattgctcctgatattctttgtcttggaaaggctcttactggaggaactatgactctttctgctactcttactactagagaagttgctgaaactatttctaatggagaagctggatgttttatgcatggaccaacttttatgggaaatccacttgcttgtgctgctgctaatgcttctcttgctattcttgaatctggagattggcaacaacaagttgctgatattgaagttcaacttagagaacaacttgctcctgctagagatgctgaaatggttgctgatgttagagttcttggagctattggagttgttgaaactactcatcctgttaatatggctgctcttcaaaagttttttgttgaacaaggagtttggattagaccatttggaaagcttatttatcttatgccaccatatattattcttccacaacaacttcaaagacttactgctgctgttaatagagctgttcaagatgaaacttttttttgtcaataa

SEQ ID NO: 203 - DNA, 1410 bp, synthetic construct
  source 1..1410: mol_type = other DNA; note = Escherichia coli BioA nucleic acid with MTP
atgtctgtttcttgttgttgtagaaatcttggaaagactattaagaaggctattccatctcatcatcttcatcttagatctcttggaggatctctttatagaagaattcaatcttcttctatgactactgatgatcttgcttttgatcaaagacatatttggcatccatatacttctatgacttctccacttcctgtttatcctgttgtttctgctgaaggatgtgaacttattctttctgatggaagaagacttgttgatggaatgtcttcttggtgggctgctattcatggatataatcatccacaacttaatgctgctatgaagtctcaaattgatgctatgtctcatgttatgtttggaggaattactcatgctcctgctattgaactttgtagaaagcttgttgctatgactccacaaccacttgaatgtgtttttcttgctgattctggatctgttgctgttgaagttgctatgaagatggctcttcaatattggcaagctaagggagaagctagacaaagatttcttacttttagaaatggatatcatggagatacttttggagctatgtctgtttgtgatcctgataattctatgcattctctttggaagggatatcttcctgaaaatctttttgctcctgctccacaatctagaatggatggagaatgggatgaaagagatatggttggatttgctagacttatggctgctcatagacatgaaattgctgctgttattattgaaccaattgttcaaggagctggaggaatgagaatgtatcatcctgaatggcttaagagaattagaaagatttgtgatagagaaggaattcttcttattgctgatgaaattgctactggatttggaagaactggaaagctttttgcttgtgaacatgctgaaattgctcctgatattctttgtcttggaaaggctcttactggaggaactatgactctttctgctactcttactactagagaagttgctgaaactatttctaatggagaagctggatgttttatgcatggaccaacttttatgggaaatccacttgcttgtgctgctgctaatgcttctcttgctattcttgaatctggagattggcaacaacaagttgctgatattgaagttcaacttagagaacaacttgctcctgctagagatgctgaaatggttgctgatgttagagttcttggagctattggagttgttgaaactactcatcctgttaatatggctgctcttcaaaagttttttgttgaacaaggagtttggattagaccatttggaaagcttatttatcttatgccaccatatattattcttccacaacaacttcaaagacttactgctgctgttaatagagctgttcaagatgaaacttttttttgtcaataa

SEQ ID NO: 204 - DNA, 17284 bp, synthetic construct
  source 1..17284: mol_type = other DNA; note = CPF1 PLANT EXPRESSION VECTOR
aaccctgtggttggcatgcacatacaaatggacgaacggataaaccttttcacgcccttttaaatatccgattattctaataaacgctcttttctcttaggtttacccgccaatatatcctgtcaaacactgatagtttaaactggcactagcctaacggtgttgactaactaggccgcttccctaattagctaaggtaccggcgcgccaccggtgagctcgggacccgaattcattatgtggtctaggtaggttctatatataagaaaacttgaaatgttctaaaaaaaaattcaagcccatgcatgattgaagcaaacggtatagcaacggtgttaacctgatctagtgatctcttgcaatccttaacggccacctaccgcaggtagcaaacggcgtccccctcctcgatatctccgcggcgacctctggctttttccgcggaattgcgcggtggggacggattccacgagaccgcgacgcaaccgcctctcgccgctgggccccacaccgctcggtgccgtagcctcacgggactctttctccctcctcccccgttataaattggcttcatcccctccttgcctcatccatccaaatcccagtccccaatcccatcccttcgtaggagaaattcatcgaagctaagcgaatcctcgcgatcctctcaaggtactgcgagttttcgatccccctctcgacccctcgtatgtttgtgtttgtcgtagcgtttgattaggtatgctttccctgtttgtgttcgtcgtagcgtttgattaggtatgctttccctgttcgtgttcatcgtagtgtttgattaggtcgtgtgaggcgatggcctgctcgcgtccttcgatctgtagtcgatttgcgggtcgtggtgtagatctgcgggctgtgatgaagttatttggtgtgatctgctcgcctgattctgcgggttggctcgagtagatatgatggttggaccggttggttcgtttaccgcgctagggttgggctgggatgatgttgcatgcgccgttgcgcgtgatcccgcagcaggacttgcgtttgattgccagatctcgttacgattatgtgatttggtttggactttttagatctgtagcttctgcttatgtgccagatgcgcctactgctcatatgcctgatgataatcataaatggctgtggaactaactagttgattgcggagtcatgtatcagctacaggtgtagggactagctacaggtgtagggacttgcgtctaattgtttggtcctttactcatgttgcaattatgcaatttagtttagattgtttgttccactcatctaggctgtaaaagggacactgcttagattgctgtttaatctttttagtagattatattatattggtaacttattacccctattacatgccatacgtgacttctgctcatgcctgatgataatcatagatcactgtggaattaattagttgattgttgaatcatgtttcatgtacataccacggcacaattgcttagttccttaacaaatgcaaattttactgatccatgtatgatttgcgtggttctctaatgtgaaatactatagctacttgttagtaagaatcaggttcgtatgcttaatgctgtatgtgccttctgctcatgcctgatgataatcatatatcactggaattaattagttgatcgtttaatcatatatcaagtacataccatgccacaatttttagtcacttaacccatgcagattgaactggtccctgcatgttttgctaaattgttctattctgattagaccatatatcatgtatttttttttggtaatggttctcttattttaaatgctatatagttctggtacttgttagaaagatctgcttcatagtttagttgcctatccctcgaattaggatgctgagcagctgatcctatagctttgtttcatgtatcaattcttttgtgttcaacagtcagtttttgttagattcattgtaacttatggtcgcttactcttctggtcctcaatgcttgcagggatcccctaaatagaccatggctcctaagaagaagcggaaggttggtattcacggggtgcctgcggcttcaaagctcgagaaattcaccaactgttattcgttgagcaaaacactgcggtttaaagcgattccagtcggcaagactcaagagaatatagacaataagcggctgttggtggaagatgaaaagcgcgcggaagactacaaaggggtgaagaagttgttggacagatactacctctcttttatcaatgatgtcttgcactcaatcaaattgaagaatctgaacaactacatctccctcttcagaaagaaaacaaggacagaaaaggagaataaggaacttgaaaatttggagatcaatctgaggaaagagatcgcgaaagcctttaaaggcaacgaaggatacaaaagtctgttcaagaaggatataattgagacaattttgccagagttcctcgatgacaaggacgagattgcgctggtcaattcgttcaacggattcacaacagcattcacaggcttctttgataatcgggaaaatatgttctctgaggaggcaaagtccacttctattgcgttcaggtgtatcaatgagaatctcactaggtacatttccaacatggatatctttgagaaggttgacgcaatttttgacaagcacgaagttcaggagattaaggagaagatcctcaattccgattatgacgttgaggacttcttcgagggtgagttttttaatttcgtgctcactcaagagggtatcgacgtgtataatgcgatcatcggtgggttcgtgactgagtccggtgaaaagattaagggattgaacgagtatatcaacctttacaaccaaaagacgaaacagaagctgccaaagttcaagcctctttacaaacaggttctttcagaccgcgagtcactctcgttctatggggagggctacacttcggatgaggaagtcctggaggtgttcaggaatactctcaataagaattcggagattttctcttctataaaaaaactggaaaagttgtttaagaattttgacgaatactctagcgccggcatatttgtgaaaaacggcccggccatatcaacgataagtaaagatatcttcggcgaatggaacgtgatcagagacaaatggaacgcggagtatgacgatattcacctgaagaagaaggctgtcgtaacggagaagtacgaggatgatcgcaggaaaagcttcaaaaagatcggaagtttcagcctggaacagttgcaggagtatgctgacgccgatcttagcgtcgtcgagaagttgaaggagataatcatccaaaaggtcgacgagatatataaagtctatggatcaagtgaaaaactgttcgacgccgacttcgttttggagaagtccctgaagaagaacgacgctgttgttgccattatgaaggatctgctcgacagcgtgaagagtttcgagaactatattaaggcttttttcggggaggggaaggagactaacagagatgagtccttctacggagacttcgtcctcgcgtacgatatactccttaaggtagaccacatctacgacgcaatcagaaattacgtgacacaaaagccgtacagcaaggacaagttcaaactctacttccagaacccccagttcatgggcggctgggacaaggacaaggaaacggattacagggctacgatcctgaggtatggttcaaaatactacttggcgattatggacaagaagtacgccaagtgtctccagaagattgacaaagacgatgtcaatggcaattatgagaagatcaactacaagctgcttccgggtccgaacaagatgctcccaaaggttttcttcagcaagaaatggatggcctactataacccaagcgaggacatccagaagatttataagaacggtacgttcaagaagggcgacatgttcaatcttaacgactgtcacaagctgatcgacttcttcaaagactcaattagccggtacccaaagtggtctaacgcctatgacttcaacttttcggaaaccgagaagtacaaggatatagccggattttatagagaggtggaagagcagggctacaaggtgtcattcgagtccgccagcaagaaggaagtggacaagctcgtggaagagggtaagctctacatgttccagatttataataaagactttagcgataagagccacgggacacctaatctccacacaatgtatttcaagctgctcttcgacgagaataaccacggccaaatcaggttgtcaggaggggctgaactcttcatgcggcgcgctagccttaagaaggaggagcttgtagtccaccctgcgaatagtccaattgcgaataagaacccggacaatcctaaaaagactacaacattgagctacgacgtgtacaaggataagaggttttccgaggatcagtacgagctccacatcccgattgcgatcaacaagtgcccaaagaatattttcaagataaacacagaggtgcgtgtactcctgaagcatgacgacaatccttacgtcattgggattgatcggggcgagaggaacctcctctatattgtggtggtggacgggaaggggaacatagtcgaacagtactcccttaacgaaataattaacaatttcaacggcatccgtatcaagaccgactaccattcgttgctggacaagaaggagaaggagagatttgaggcgcggcaaaattggacaagtatcgagaacatcaaggaactcaaagcaggttatatctctcaagttgtgcataagatatgcgagctggttgagaagtatgacgcagtgatcgctcttgaggacctcaactcgggctttaagaattctagagttaaagtggagaagcaggtctatcaaaagttcgagaagatgcttatagataagctcaactacatggtcgataagaaatcgaacccatgtgccaccggcggcgcactcaaaggttaccaaataacaaacaaattcgagtccttcaaatcgatgagtactcagaatgggttcatattttatataccggcgtggcttacgtctaagatcgacccgtcaactggttttgtcaacctgttgaagacgaaatacacgtccattgccgattcaaaaaagttcatatctagttttgatcgtattatgtacgtcccagaggaagatcttttcgagtttgctctcgactacaaaaacttttcgcgcaccgatgcggattacattaaaaaatggaaactctattcgtacggcaacagaatcaggatttttcgcaaccctaagaagaataacgtctttgattgggaggaagtttgcttgactagcgcgtacaaggagctctttaataagtatggcattaactaccaacagggtgatatcagagcactgctttgcgaacaatctgacaaggctttctactcatccttcatggctttgatgagcctgatgctccagatgagaaattcaattacaggcagaaccgacgtggatttcttgatctccccggttaaaaattctgatggcatcttttacgatagcaggaactatgaagcgcaagagaatgcgattctgccaaaaaatgcagacgccaacggtgcctataacatcgccaggaaagtcctgtgggcgatcggccagttcaaaaaggccgaagacgaaaaattggacaaggtcaaaatcgctatcagcaacaaagagtggctggagtatgctcagacatccgtaaagcataagcgtcctgctgccaccaaaaaggccggacaggctaagaaaaagaagtgattaattaagatcgttcaaacatttggcaataaagtttcttaagattgaatcctgttgccggtcttgcgatgattatcatataatttctgttgaattacgttaagcatgtaataattaacatgtaatgcatgacgttatttatgagatgggtttttatgattagagtcccgcaattatacatttaatacgcgatagaaaacaaaatatagcgcgcaaactaggataaattatcgcgcgcggtgtcatctatgttactagatcttcgaagaattcattatgtggtctaggtaggttctatatataagaaaacttgaaatgttctaaaaaaaaattcaagcccatgcatgattgaagcaaacggtatagcaacggtgttaacctgatctagtgatctcttgcaatccttaacggccacctaccgcaggtagcaaacggcgtccccctcctcgatatctccgcggcgacctctggctttttccgcggaattgcgcggtggggacggattccacgagaccgcgacgcaaccgcctctcgccgctgggccccacaccgctcggtgccgtagcctcacgggactctttctccctcctcccccgttataaattggcttcatcccctccttgcctcatccatccaaatcccagtccccaatcccatcccttcgtaggagaaattcatcgaagctaagcgaatcctcgcgatcctctcaaggtactgcgagttttcgatccccctctcgacccctcgtatgtttgtgtttgtcgtagcgtttgattaggtatgctttccctgtttgtgttcgtcgtagcgtttgattaggtatgctttccctgttcgtgttcatcgtagtgtttgattaggtcgtgtgaggcgatggcctgctcgcgtccttcgatctgtagtcgatttgcgggtcgtggtgtagatctgcgggctgtgatgaagttatttggtgtgatctgctcgcctgattctgcgggttggctcgagtagatatgatggttggaccggttggttcgtttaccgcgctagggttgggctgggatgatgttgcatgcgccgttgcgcgtgatcccgcagcaggacttgcgtttgattgccagatctcgttacgattatgtgatttggtttggactttttagatctgtagcttctgcttatgtgccagatgcgcctactgctcatatgcctgatgataatcataaatggctgtggaactaactagttgattgcggagtcatgtatcagctacaggtgtagggactagctacaggtgtagggacttgcgtctaattgtttggtcctttactcatgttgcaattatgcaatttagtttagattgtttgttccactcatctaggctgtaaaagggacactgcttagattgctgtttaatctttttagtagattatattatattggtaacttattacccctattacatgccatacgtgacttctgctcatgcctgatgataatcatagatcactgtggaattaattagttgattgttgaatcatgtttcatgtacataccacggcacaattgcttagttccttaacaaatgcaaattttactgatccatgtatgatttgcgtggttctctaatgtgaaatactatagctacttgttagtaagaatcaggttcgtatgcttaatgctgtatgtgccttctgctcatgcctgatgataatcatatatcactggaattaattagttgatcgtttaatcatatatcaagtacataccatgccacaatttttagtcacttaacccatgcagattgaactggtccctgcatgttttgctaaattgttctattctgattagaccatatatcatgtatttttttttggtaatggttctcttattttaaatgctatatagttctggtacttgttagaaagatctgcttcatagtttagttgcctatccctcgaattaggatgctgagcagctgatcctatagctttgtttcatgtatcaattcttttgtgttcaacagtcagtttttgttagattcattgtaacttatggtcgcttactcttctggtcctcaatgcttgcaggggatccaaattactgatgagtccgtgaggacgaaacgagtaagctcgtctaatttctactaagtgtagatatgcatgcgcaagttggtggactggccggcatggtcccagcctcctcgctggcgccggctgggcaacatgcttcggcatggcgaatgggacgatcgttcaaacatttggcaataaagtttcttaagattgaatcctgttgccggtcttgcgatgattatcatataatttctgttgaattacgttaagcatgtaataattaacatgtaatgcatgacgttatttatgagatgggtttttatgattagagtcccgcaattatacatttaatacgcgatagaaaacaaaatatagcgcgcaaactaggataaattatcgcgcgcggtgtcatctatgttactagatccggaccgcgcctgcagtgcagcgtgacccggtcgtgcccctctctagagataatgagcattgcatgtctaagttataaaaaattaccacatattttttttgtcacacttgtttgaagtgcagtttatctatctttatacatatatttaaactttactctacgaataatataatctatagtactacaataatatcagtgttttagagaatcatataaatgaacagttagacatggtctaaaggacaattgagtattttgacaacaggactctacagttttatctttttagtgtgcatgtgttctcctttttttttgcaaatagcttcacctatataatacttcatccattttattagtacatccatttagggtttagggttaatggtttttatagactaatttttttagtacatctattttattctattttagcctctaaattaagaaaactaaaactctattttagtttttttatttaataatttagatataaaatagaataaaataaagtgactaaaaattaaacaaataccctttaagaaattaaaaaaactaaggaaacatttttcttgtttcgagtagataatgccagcctgttaaacgccgtcgacgagtctaacggacaccaaccagcgaaccagcagcgtcgcgtcgggccaagcgaagcagacggcacggcatctctgtcgctgcctctggacccctctcgagagttccgctccaccgttggacttgctccgctgtcggcatccagaaattgcgtggcggagcggcagacgtgagccggcacggcaggcggcctcctcctcctctcacggcaccggcagctacgggggattcctttcccaccgctccttcgctttcccttcctcgcccgccgtaataaatagacaccccctccacaccctctttccccaacctcgtgttgttcggagcgcacacacacacaaccagatctcccccaaatccacccgtcggcacctccgcttcaaggtacgccgctcgtcctcccccccccccctctctaccttctctagatcggcgttccggtccatggttagggcccggtagttctacttctgttcatgtttgtgttagatccgtgtttgtgttagatccgtgctgctagcgttcgtacacggatgcgacctgtacgtcagacacgttctgattgctaacttgccagtgtttctctttggggaatcctgggatggctctagccgttccgcagacgggatcgatttcatgattttttttgtttcgttgcatagggtttggtttgcccttttcctttatttcaatatatgccgtgcacttgtttgtcgggtcatcttttcatgcttttttttgtcttggttgtgatgatgtggtctggttgggcggtcgttctagatcggagtagaattctgtttcaaactacctggtggatttattaattttggatctgtatgtgtgtgccatacatattcatagttacgaattgaagatgatggatggaaatatcgatctaggataggtatacatgttgatgcgggttttactgatgcatatacagagatgctttttgttcgcttggttgtgatgatgtggtgtggttgggcggtcgttcattcgttctagatcggagtagaatactgtttcaaactacctggtgtatttattaattttggaactgtatgtgtgtgtcatacatcttcatagttacgagtttaagatggatggaaatatcgatctaggataggtatacatgttgatgtgggttttactgatgcatatacatgatggcatatgcagcatctattcatatgctctaaccttgagtacctatctattataataaacaagtatgttttataattattttgatcttgatatacttggatgatggcatatgcagcagctatatgtggatttttttagccctgccttcatacgctatttatttgcttggtactgtttcttttgtcgatgctcaccctgttgtttggtgttacttctgcagggatccggcagcagccatgcagaagctgatcaacagcgtgcagaactacgcctggggcagcaagaccgccctgaccgagctgtacggcatggagaaccccagcagccagcccatggccgagctgtggatgggcgcccaccccaagagcagcagccgcgtgcagaacgccgccggcgacatcgtgagcctgcgcgacgtgatcgagagcgacaagagcaccctgctgggcgaggccgtggccaagcgcttcggcgagctgcccttcctgttcaaggtgctgtgcgccgcccagcccctgagcatccaggtgcaccccaacaagcacaacagcgagatcggcttcgccaaggagaacgccgccggcatccccatggacgccgccgagcgcaactacaaggaccccaaccacaagcccgagctggtgttcgccctgacccccttcctggccatgaacgccttccgcgagttcagcgagatcgtgagcctgctgcagcccgtggccggcgcccaccccgccatcgcccacttcctgcagcagcccgacgccgagcgcctgagcgagctgttcgccagcctgctgaacatgcagggcgaggagaagagccgcgccctggccatcctgaagagcgccctggacagccagcagggcgagccctggcagaccatccgcctgatcagcgagttctaccccgaggacagcggcctgttcagccccctgctgctgaacgtggtgaagctgaaccccggcgaggccatgttcctgttcgccgagaccccccacgcctacctgcagggcgtggccctggaggtgatggccaacagcgacaacgtgctgcgcgccggcctgacccccaagtacatcgacatccccgagctggtggccaacgtgaagttcgaggccaagcccgccaaccagctgctgacccagcccgtgaagcagggcgccgagctggacttccccatccccgtggacgacttcgccttcagcctgcacgacctgagcgacaaggagaccaccatcagccagcagagcgccgccatcctgttctgcgtggagggcgacgccaccctgtggaagggcagccagcagctgcagctgaagcccggcgagagcgccttcatcgccgccaacgagagccccgtgaccgtgaagggccacggccgcctggcccgcgtgtacaacaagctgtgataggagctcgatccgtcgacctgcagatcgttcaaacatttggcaataaagtttcttaagattgaatcctgttgccggtcttgcgatgattatcatataatttctgttgaattacgttaagcatgtaataattaacatgtaatgcatgacgttatttatgagatgggtttttatgattagagtcccgcaattatacatttaatacgcgatagaaaacaaaatatagcgcgcaaactaggataaattatcgcgcgcggtgtcatctatgttactagatcggcgcgccgcaattgaagtttgggcggccagcatggccgtatccgcaatgtgttattaagttgtctaagcgtcaatttgtttacaccacaatatatcctgccaccagccagccaacagctccccgaccggcagctcggcacaaaatcaccactcgatacaggcagcccatcagaattaattctcatgtttgacagcttatcatcgactgcacggtgcaccaatgcttctggcgtcaggcagccatcggaagctgtggtatggctgtgcaggtcgtaaatcactgcataattcgtgtcgctcaaggcgcactcccgttctggataatgttttttgcgccgacatcataacggttctggcaaatattctgaaatgagctgttgacaattaatcatccggctcgtataatgtgtggaattgtgagcggataacaatttcacacaggaaacagaccatgagggaagcgttgatcgccgaagtatcgactcaactatcagaggtagttggcgtcatcgagcgccatctcgaaccgacgttgctggccgtacatttgtacggctccgcagtggatggcggcctgaagccacacagtgatattgatttgctggttacggtgaccgtaaggcttgatgaaacaacgcggcgagctttgatcaacgaccttttggaaacttcggcttcccctggagagagcgagattctccgcgctgtagaagtcaccattgttgtgcacgacgacatcattccgtggcgttatccagctaagcgcgaactgcaatttggagaatggcagcgcaatgacattcttgcaggtatcttcgagccagccacgatcgacattgatctggctatcttgctgacaaaagcaagagaacatagcgttgccttggtaggtccagcggcggaggaactctttgatccggttcctgaacaggatctatttgaggcgctaaatgaaaccttaacgctatggaactcgccgcccgactgggctggcgatgagcgaaatgtagtgcttacgttgtcccgcatttggtacagcgcagtaaccggcaaaatcgcgccgaaggatgtcgctgccgactgggcaatggagcgcctgccggcccagtatcagcccgtcatacttgaagctaggcaggcttatcttggacaagaagatcgcttggcctcgcgcgcagatcagttggaagaatttgttcactacgtgaaaggcgagatcaccaaagtagtcggcaaataaagctctagtggatctccgtacccggggatctggctcgcggcggacgcacgacgccggggcgagaccataggcgatctcctaaatcaatagtagctgtaacctcgaagcgtttcacttgtaacaacgattgagaatttttgtcataaaattgaaatacttggttcgcatttttgtcatccgcggtcagccgcaattctgacgaactgcccatttagctggagatgattgtacatccttcacgtgaaaatttctcaagcgctgtgaacaagggttcagattttagattgaaaggtgagccgttgaaacacgttcttcttgtcgatgacgacgtcgctatgcggcatcttattattgaataccttacgatccacgccttcaaagtgaccgcggtagccgacagcacccagttcacaagagtactctcttccgcgacggtcgatgtcgtggttgttgatctagatttaggtcgtgaagatgggctcgagctaggagcaagtgattttatcgctaagccgttcagtatcagagagtttctagcacgcattcgggttgccttgcgcgtgcgccccaacgttgtccgctccaaagaccgacggtctttttgttttactgactggacacttaatctcaggcaacgtcgcttgatgtccgaagctggcggtgaggtgaaacttacggcaggtgagttcaatcttctcctcgcgtttttagagaaaccccgcgacgttctatcgcgcgagcaacttctcattgccagtcgagtacgcgacgaggaggtttatgacaggagtatagatgttctcattttgaggctgcgccgcaaacttgaggcagatccgtcaagccctcaactgataaaaacagcaagaggtgccggttatttctttgacgcggacgtgcaggtttcgcacggggggacgatggcagcctgagccaattcccagatccccgaggaatcggcgtgagcggtcgcaaaccatccggcccggtacaaatcggcgcggcgctgggtgatgacctggtggagaagttgaaggccgcgcaggccgcccagcggcaacgcatcgaggcagaagcacgccccggtgaatcgtggcaagcggccgctgatcgaatccgcaaagaatcccggcaaccgccggcagccggtgcgccgtcgattaggaagccgcccaagggcgacgagcaaccagattttttcgttccgatgctctatgacgtgggcacccgcgatagtcgcagcatcatggacgtggccgttttccgtctgtcgaagcgtgaccgacgagctggcgaggtgatccgctacgagcttccagacgggcacgtagaggtttccgcagggccggccggcatggccagtgtgtgggattacgacctggtactgatggcggtttcccatctaaccgaatccatgaaccgataccgggaagggaagggagacaagcccggccgcgtgttccgtccacacgttgcggacgtactcaagttctgccggcgagccgatggcggaaagcagaaagacgacctggtagaaacctgcattcggttaaacaccacgcacgttgccatgcagcgtacgaagaaggccaagaacggccgcctggtgacggtatccgagggtgaagccttgattagccgctacaagatcgtaaagagcgaaaccgggcggccggagtacatcgagatcgagctagctgattggatgtaccgcgagatcacagaaggcaagaacccggacgtgctgacggttcaccccgattactttttgatcgatcccggcatcggccgttttctctaccgcctggcacgccgcgccgcaggcaaggcagaagccagatggttgttcaagacgatctacgaacgcagtggcagcgccggagagttcaagaagttctgtttcaccgtgcgcaagctgatcgggtcaaatgacctgccggagtacgatttgaaggaggaggcggggcaggctggcccgatcctagtcatgcgctaccgcaacctgatcgagggcgaagcatccgccggttcctaatgtacggagcagatgctagggcaaattgccctagcaggggaaaaaggtcgaaaaggtctctttcctgtggatagcacgtacattgggaacccaaagccgtacattgggaaccggaacccgtacattgggaacccaaagccgtacattgggaaccggtcacacatgtaagtgactgatataaaagagaaaaaaggcgatttttccgcctaaaactctttaaaacttattaaaactcttaaaacccgcctggcctgtgcataactgtctggccagcgcacagccgaagagctgcaaaaagcgcctacccttcggtcgctgcgctccctacgccccgccgcttcgcgtcggcctatcgcggccgctggccgctcaaaaatggctggcctacggccaggcaatctaccagggcgcggacaagccgcgccgtcgccactcgaccgccggcgctgaggtctgcctcgtgaagaaggtgttgctgactcataccaggcctgaatcgccccatcatccagccagaaagtgagggagccacggttgatgagagctttgttgtaggtggaccagttggtgattttgaacttttgctttgccacggaacggtctgcgttgtcgggaagatgcgtgatctgatccttcaactcagcaaaagttcgatttattcaacaaagccgccgtcccgtcaagtcagcgtaatgctctgccagtgttacaaccaattaaccaattctgattagaaaaactcatcgagcatcaaatgaaactgcaatttattcatatcaggattatcaataccatatttttgaaaaagccgtttctgtaatgaaggagaaaactcaccgaggcagttccataggatggcaagatcctggtatcggtctgcgattccgactcgtccaacatcaatacaacctattaatttcccctcgtcaaaaataaggttatcaagtgagaaatcaccatgagtgacgactgaatccggtgagaatggcaaaagctctgcattaatgaatcggccaacgcgcggggagaggcggtttgcgtattgggcgctcttccgcttcctcgctcactgactcgctgcgctcggtcgttcggctgcggcgagcggtatcagctcactcaaaggcggtaatacggttatccacagaatcaggggataacgcaggaaagaacatgtgagcaaaaggccagcaaaaggccaggaaccgtaaaaaggccgcgttgctggcgtttttccataggctccgcccccctgacgagcatcacaaaaatcgacgctcaagtcagaggtggcgaaacccgacaggactataaagataccaggcgtttccccctggaagctccctcgtgcgctctcctgttccgaccctgccgcttaccggatacctgtccgcctttctcccttcgggaagcgtggcgctttctcatagctcacgctgtaggtatctcagttcggtgtaggtcgttcgctccaagctgggctgtgtgcacgaaccccccgttcagcccgaccgctgcgccttatccggtaactatcgtcttgagtccaacccggtaagacacgacttatcgccactggcagcagccactggtaacaggattagcagagcgaggtatgtaggcggtgctacagagttcttgaagtggtggcctaactacggctacactagaagaacagtatttggtatctgcgctctgctgaagccagttaccttcggaaaaagagttggtagctcttgatccggcaaacaaaccaccgctggtagcggtggtttttttgtttgcaagcagcagattacgcgcagaaaaaaaggatctcaagaagatcctttgatcttttctacggggtctgacgctcagtggaacgaaaactcacgttaagggattttggtcatgagattatcaaaaaggatcttcacctagatccttttgatccggacaaacaaacaaatacagtaatttagccaggacgtcggccgaaagagcgacaagcagatcacgcttttcgacagcgtcggatttgcgatcgaggatttttcggcgctgcgctacgtccgcgaccgcgttgagggatcaagccacagcagcccactcgaccttctagccgacccagacgagccaagggatctttttggaatgctgctccgtcgtcaggctttccgacgtttgggtggttgaacagaagtcattatcgcacggaatgccaagcactcccgagggg

SEQ ID NO: 205 - DNA, 127 bp, synthetic construct
  source 1..127: mol_type = other DNA; note = DONOR SEQUENCE FOR CORN BIODA C372D
gattctctaaatctttgatgtagattaaagacaaaatgctcatccctcaattcgatgcagatgcaagttggtggactcaagggcctgattctaacttgcaggttttgtcctcacagatctggatatg

SEQ ID NO: 206 - DNA, 13600 bp, synthetic construct
  source 1..13600: mol_type = other DNA; note = pBin TMV EcBioA binary vector
agcttgcatgcctgcaggtcaacatggtggagcacgacacacttgtctactccaaaaatatcaaagatacagtctcagaagaccaaagggcaattgagacttttcaacaaagggtaatatccggaaacctcctcggattccattgcccagctatctgtcactttattgtgaagatagtggaaaaggaaggtggctcctacaaatgccatcattgcgataaaggaaaggccatcgttgaagatgcctctgccgacagtggtcccaaagatggacccccacccacgaggagcatcgtggaaaaagaagacgttccaaccacgtcttcaaagcaagtggattgatgtgataacatggtggagcacgacacacttgtctactccaaaaatatcaaagatacagtctcagaagaccaaagggcaattgagacttttcaacaaagggtaatatccggaaacctcctcggattccattgcccagctatctgtcactttattgtgaagatagtggaaaaggaaggtggctcttacaaatgccatcattgcgataaaggaaaggccatcgttgaagatgcctctgccgacagtggtcccaaagatggacccccacccacgaggagcatcgtggaaaaagaagacgttccaaccacgtcttcaaagcaagtggattgatgtgatatctccactgacgtaagggatgacgcacaatcccactatccttcgcaagacccttcctctatataaggaagttcatttcatttggagaggacctcgagtatttttacaacaattaccaacaacaacaaacaacaaacaacattacaattactatttacaattacacatatgactactgatgatcttgcttttgatcaaagacatatttggcatccatatacttctatgacttctccacttcctgtttatcctgttgtttctgctgaaggatgtgaacttattctttctgatggaagaagacttgttgatggaatgtcttcttggtgggctgctattcatggatataatcatccacaacttaatgctgctatgaagtctcaaattgatgctatgtctcatgttatgtttggaggaattactcatgctcctgctattgaactttgtagaaagcttgttgctatgactccacaaccacttgaatgtgtttttcttgctgattctggatctgttgctgttgaagttgctatgaagatggctcttcaatattggcaagctaagggagaagctagacaaagatttcttacttttagaaatggatatcatggagatacttttggagctatgtctgtttgtgatcctgataattctatgcattctctttggaagggatatcttcctgaaaatctttttgctcctgctccacaatctagaatggatggagaatgggatgaaagagatatggttggatttgctagacttatggctgctcatagacatgaaattgctgctgttattattgaaccaattgttcaaggagctggaggaatgagaatgtatcatcctgaatggcttaagagaattagaaagatttgtgatagagaaggaattcttcttattgctgatgaaattgctactggatttggaagaactggaaagctttttgcttgtgaacatgctgaaattgctcctgatattctttgtcttggaaaggctcttactggaggaactatgactctttctgctactcttactactagagaagttgctgaaactatttctaatggagaagctggatgttttatgcatggaccaacttttatgggaaatccacttgcttgtgctgctgctaatgcttctcttgctattcttgaatctggagattggcaacaacaagttgctgatattgaagttcaacttagagaacaacttgctcctgctagagatgctgaaatggttgctgatgttagagttcttggagctattggagttgttgaaactactcatcctgttaatatggctgctcttcaaaagttttttgttgaacaaggagtttggattagaccatttggaaagcttatttatcttatgccaccatatattattcttccacaacaacttcaaagacttactgctgctgttaatagagctgttcaagatgaaacttttttttgtcaataaggtaccgagctcgaatttccccgatcgttcaaacatttggcaataaagtttcttaagattgaatcctgttgccggtcttgcgatgattatcatataatttctgttgaattacgttaagcatgtaataattaacatgtaatgcatgacgttatttatgagatgggtttttatgattagagtcccgcaattatacatttaatacgcgatagaaaacaaaatatagcgcgcaaactaggataaattatcgcgcgcggtgtcatctatgttactagatcgggaattcctagagatcatgagcggagaattaagggagtcacgttatgacccccgccgatgacgcgggacaagccgttttacgtttggaactgacagaaccgcaacgttgaaggagccactcagccgcgggtttctggagtttaatgagctaagcacatacgtcagaaaccattattgcgcgttcaaaagtcgcctaaggtcactatcagctagcaaatatttcttgtcaaaaatgctccactgacgttccataaattcccctcggtatccaattagagtctcatattcactctcaatccaaataatctgcaccggatctggatcgtttcgcatgattgaacaagatggattgcacgcaggttctccggccgcttgggtggagaggctattcggctatgactgggcacaacagacaatcggctgctctgatgccgccgtgttccggctgtcagcgcaggggcgcccggttctttttgtcaagaccgacctgtccggtgccctgaatgaactgcaggacgaggcagcgcggctatcgtggctggccacgacgggcgttccttgcgcagctgtgctcgacgttgtcactgaagcgggaagggactggctgctattgggcgaagtgccggggcaggatctcctgtcatctcaccttgctcctgccgagaaagtatccatcatggctgatgcaatgcggcggctgcatacgcttgatccggctacctgcccattcgaccaccaagcgaaacatcgcatcgagcgagcacgtactcggatggaagccggtcttgtcgatcaggatgatctggacgaagagcatcaggggctcgcgccagccgaactgttcgccaggctcaaggcgcgcatgcccgacggcgaggatctcgtcgtgacccatggcgatgcctgcttgccgaatatcatggtggaaaatggccgcttttctggattcatcgactgtggccggctgggtgtggcggaccgctatcaggacatagcgttggctacccgtgatattgctgaagagcttggcggcgaatgggctgaccgcttcctcgtgctttacggtatcgccgctcccgattcgcagcgcatcgccttctatcgccttcttgacgagttcttctgagcgggactctggggttcgaaatgaccgaccaagcgacgcccaacctgccatcacgagatttcgattccaccgccgccttctatgaaaggttgggcttcggaatcgttttccgggacgccggctggatgatcctccagcgcggggatctcatgctggagttcttcgcccacgggatctctgcggaacaggcggtcgaaggtgccgatatcattacgacagcaacggccgacaagcacaacgccacgatcctgagcgacaatatgatcgggcccggcgtccacatcaacggcgtcggcggcgactgcccaggcaagaccgagatgcaccgcgatatcttgctgcgttcggatattttcgtggagttcccgccacagacccggatgatccccgatcgttcaaacatttggcaataaagtttcttaagattgaatcctgttgccggtcttgcgatgattatcatataatttctgttgaattacgttaagcatgtaataattaacatgtaatgcatgacgttatttatgagatgggtttttatgattagagtcccgcaattatacatttaatacgcgatagaaaacaaaatatagcgcgcaaactaggataaattatcgcgcgcggtgtcatctatgttactagatcgggcctcctgtcaatgctggcggcggctctggtggtggttctggtggcggctctgagggtggtggctctgagggtggcggttctgagggtggcggctctgagggaggcggttccggtggtggctctggttccggtgattttgattatgaaaagatggcaaacgctaataagggggctatgaccgaaaatgccgatgaaaacgcgctacagtctgacgctaaaggcaaacttgattctgtcgctactgattacggtgctgctatcggcctgaatggcgcccgctcctttcgctttcttcccttcctttctcgccacgttcgccggctttccccgtcaagctctaaatcgggggctccctttagggttccgatttagtgctttacggcacctcgaccccaaaaaacttgatttgggtgatggttcacgtagtgggccatcgccctgatagacggtttttcgccctttgacgttggagtccacgttctttaatagtggactcttgttccaaactggaacaacactcaaccctatctcgggctattcttttgatttataagggattttgccgatttcggaaccaccatcaaacaggattttcgcctgctggggcaaaccagcgtggaccgcttgctgcaactctctcagggccaggcggtgaagggcaatcagctgttgcccgtctcactggtgaaaagaaaaaccaccccagtacattaaaaacgtccgcaatgtgttattaagttgtctaagcgtcaatttgtttacaccacaatatatcctgccaccagccagccaacagctccccgaccggcagctcggcacaaaatcaccactcgatacaggcagcccatcagtccgggacggcgtcagcgggagagccgttgtaaggcggcagactttgctcatgttaccgatgctattcggaagaacggcaactaagctgccgggtttgaaacacggatgatctcgcggagggtagcatgttgattgtaacgatgacagagcgttgctgcctgtgatcaaatatcatctccctcgcagagatccgaattatcagccttcttattcatttctcgcttaaccgtgacaggctgtcgatcttgagaactatgccgacataataggaaatcgctggataaagccgctgaggaagctgagtggcgctatttctttagaagtgaacgttgacgatatcaactcccctatccattgctcaccgaatggtacaggtcggggacccgaagttccgactgtcggcctgatgcatccccggctgatcgaccccagatctggggctgagaaagcccagtaaggaaacaactgtaggttcgagtcgcgagatcccccggaaccaaaggaagtaggttaaacccgctccgatcaggccgagccacgccaggccgagaacattggttcctgtaggcatcgggattggcggatcaaacactaaagctactggaacgagcagaagtcctccggccgccagttgccaggcggtaaaggtgagcagaggcacgggaggttgccacttgcgggtcagcacggttccgaacgccatggaaaccgcccccgccaggcccgctgcgacgccgacaggatctagcgctgcgtttggtgtcaacaccaacagcgccacgcccgcagttccgcaaatagcccccaggaccgccatcaatcgtatcgggctacctagcagagcggcagagatgaacacgaccatcagcggctgcacagcgcctaccgtcgccgcgaccccgcccggcaggcggtagaccgaaataaacaacaagctccagaatagcgaaatattaagtgcgccgaggatgaagatgcgcatccaccagattcccgttggaatctgtcggacgatcatcacgagcaataaacccgccggcaacgcccgcagcagcataccggcgacccctcggcctcgctgttcgggctccacgaaaacgccggacagatgcgccttgtgagcgtccttggggccgtcctcctgtttgaagaccgacagcccaatgatctcgccgtcgatgtaggcgccgaatgccacggcatctcgcaaccgttcagcgaacgcctccatgggctttttctcctcgtgctcgtaaacggacccgaacatctctggagctttcttcagggccgacaatcggatctcgcggaaatcctgcacgtcggccgctccaagccgtcgaatctgagccttaatcacaattgtcaattttaatcctctgtttatcggcagttcgtagagcgcgccgtgcgtcccgagcgatactgagcgaagcaagtgcgtcgagcagtgcccgcttgttcctgaaatgccagtaaagcgctggctgctgaacccccagccggaactgaccccacaaggccctagcgtttgcaatgcaccaggtcatcattgacccaggcgtgttccaccaggccgctgcctcgcaactcttcgcaggcttcgccgacctgctcgcgccacttcttcacgcgggtggaatccgatccgcacatgaggcggaaggtttccagcttgagcgggtacggctcccggtgcgagctgaaatagtcgaacatccgtcgggccgtcggcgacagcttgcggtacttctcccatatgaatttcgtgtagtggtcgccagcaaacagcacgacgatttcctcgtcgatcaggacctggcaacgggacgttttcttgccacggtccaggacgcggaagcggtgcagcagcgacaccgattccaggtgcccaacgcggtcggacgtgaagcccatcgccgtcgcctgtaggcgcgacaggcattcctcggccttcgtgtaataccggccattgatcgaccagcccaggtcctggcaaagctcgtagaacgtgaaggtgatcggctcgccgataggggtgcgcttcgcgtactccaacacctgctgccacaccagttcgtcatcgtcggcccgcagctcgacgccggtgtaggtgatcttcacgtccttgttgacgtggaaaatgaccttgttttgcagcgcctcgcgcgggattttcttgttgcgcgtggtgaacagggcagagcgggccgtgtcgtttggcatcgctcgcatcgtgtccggccacggcgcaatatcgaacaaggaaagctgcatttccttgatctgctgcttcgtgtgtttcagcaacgcggcctgcttggcctcgctgacctgttttgccaggtcctcgccggcggtttttcgcttcttggtcgtcatagttcctcgcgtgtcgatggtcatcgacttcgccaaacctgccgcctcctgttcgagacgacgcgaacgctccacggcggccgatggcgcgggcagggcagggggagccagttgcacgctgtcgcgctcgatcttggccgtagcttgctggaccatcgagccgacggactggaaggtttcgcggggcgcacgcatgacggtgcggcttgcgatggtttcggcatcctcggcggaaaaccccgcgtcgatcagttcttgcctgtatgccttccggtcaaacgtccgattcattcaccctccttgcgggattgccccgactcacgccggggcaatgtgcccttattcctgatttgacccgcctggtgccttggtgtccagataatccaccttatcggcaatgaagtcggtcccgtagaccgtctggccgtccttctcgtacttggtattccgaatcttgccctgcacgaataccagcgaccccttgcccaaatacttgccgtgggcctcggcctgagagccaaaacacttgatgcggaagaagtcggtgcgctcctgcttgtcgccggcatcgttgcgccacatctaggtactaaaacaattcatccagtaaaatataatattttattttctcccaatcaggcttgatccccagtaagtcaaaaaatagctcgacatactgttcttccccgatatcctccctgatcgaccggacgcagaaggcaatgtcataccacttgtccgccctgccgcttctcccaagatcaataaagccacttactttgccatctttcacaaagatgttgctgtctcccaggtcgccgtgggaaaagacaagttcctcttcgggcttttccgtctttaaaaaatcatacagctcgcgcggatctttaaatggagtgtcttcttcccagttttcgcaatccacatcggccagatcgttattcagtaagtaatccaattcggctaagcggctgtctaagctattcgtatagggacaatccgatatgtcgatggagtgaaagagcctgatgcactccgcatacagctcgataatcttttcagggctttgttcatcttcatactcttccgagcaaaggacgccatcggcctcactcatgagcagattgctccagccatcatgccgttcaaagtgcaggacctttggaacaggcagctttccttccagccatagcatcatgtccttttcccgttccacatcataggtggtccctttataccggctgtccgtcatttttaaatataggttttcattttctcccaccagcttatataccttagcaggagacattccttccgtatcttttacgcagcggtatttttcgatcagttttttcaattccggtgatattctcattttagccatttattatttccttcctcttttctacagtatttaaagataccccaagaagctaattataacaagacgaactccaattcactgttccttgcattctaaaaccttaaataccagaaaacagctttttcaaagttgttttcaaagttggcgtataacatagtatcgacggagccgattttgaaaccacaattatgggtgatgctgccaacttactgatttagtgtatgatggtgtttttgaggtgctccagtggcttctgtttctatcagctgtccctcctgttcagctactgacggggtggtgcgtaacggcaaaagcaccgccggacatcagcgctatctctgctctcactgccgtaaaacatggcaactgcagttcacttacaccgcttctcaacccggtacgcaccagaaaatcattgatatggccatgaatggcgttggatgccgggcaacagcccgcattatgggcgttggcctcaacacgattttacgtcacttaaaaaactcaggccgcagtcggtaacctcgcgcatacagccgggcagtgacgtcatcgtctgcgcggaaatggacgaacagtggggctatgtcggggctaaatcgcgccagcgctggctgttttacgcgtatgacagtctccggaagacggttgttgcgcacgtattcggtgaacgcactatggcgacgctggggcgtcttatgagcctgcttcaccctttgacgtggtgatatggatgacggatggctggccgctgtatgaatcccgcctgaagggaaagctgcacgtaatcagcaagcgatatacgcagcgaattgagcggcataacctgaatctgaggcagcacctggcacggctgggacggaagtcgctgtcgttctcaaaatcggtggagctgcatgacaaagtcatcgggcattatctgaacataaaacactatcaataagttggagtcattacccaattatgatagaatttacaagctataaggttattgtcctgggtttcaagcattagtccatgcaagtttttatgctttgcccattctatagatatattgataagcgcgctgcctatgccttgccccctgaaatccttacatacggcgatatcttctatataaaagatatattatcttatcagtattgtcaatatattcaaggcaatctgcctcctcatcctcttcatcctcttcgtcttggtagctttttaaatatggcgcttcatagagtaattctgtaaaggtccaattctcgttttcatacctcggtataatcttacctatcacctcaaatggttcgctgggtttatcgcacccccgaacacgagcacggcacccgcgaccactatgccaagaatgcccaaggtaaaaattgccggccccgccatgaagtccgtgaatgccccgacggccgaagtgaagggcaggccgccacccaggccgccgccctcactgcccggcacctggtcgctgaatgtcgatgccagcacctgcggcacgtcaatgcttccgggcgtcgcgctcgggctgatcgcccatcccgttactgccccgatcccggcaatggcaaggactgccagcgctgccatttttggggtgaggccgttcgcggccgaggggcgcagcccctggggggatgggaggcccgcgttagcgggccgggagggttcgagaagggggggcaccccccttcggcgtgcgcggtcacgcgcacagggcgcagccctggttaaaaacaaggtttataaatattggtttaaaagcaggttaaaagacaggttagcggtggccgaaaaacgggcggaaacccttgcaaatgctggattttctgcctgtggacagcccctcaaatgtcaataggtgcgcccctcatctgtcagcactctgcccctcaagtgtcaaggatcgcgcccctcatctgtcagtagtcgcgcccctcaagtgtcaataccgcagggcacttatccccaggcttgtccacatcatctgtgggaaactcgcgtaaaatcaggcgttttcgccgatttgcgaggctggccagctccacgtcgccggccgaaatcgagcctgcccctcatctgtcaacgccgcgccgggtgagtcggcccctcaagtgtcaacgtccgcccctcatctgtcagtgagggccaagttttccgcgaggtatccacaacgccggcggccgcggtgtctcgcacacggcttcgacggcgtttctggcgcgtttgcagggccatagacggccgccagcccagcggcgagggcaaccagcccggtgagcgtcggaaaggcgctcggtcttgccttgctcgtcggtgatgtacttcaccagctccgcgaagtcgctcttcttgatggagcgcatggggacgtgcttggcaatcacgcgcaccccccggccgttttagcggctaaaaaagtcatggctctgccctcgggcggaccacgcccatcatgaccttgccaagctcgtcctgcttctcttcgatcttcgccagcagggcgaggatcgtggcatcaccgaaccgcgccgtgcgcgggtcgtcggtgagccagagtttcagcaggccgcccaggcggcccaggtcgccattgatgcgggccagctcgcggacgtgctcatagtccacgacgcccgtgattttgtagccctggccgacggccagcaggtaggccgacaggctcatgccggccgccgccgccttttcctcaatcgctcttcgttcgtctggaaggcagtacaccttgataggtgggctgcccttcctggttggcttggtttcatcagccatccgcttgccctcatctgttacgccggcggtagccggccagcctcgcagagcaggattcccgttgagcaccgccaggtgcgaataagggacagtgaagaaggaacacccgctcgcgggtgggcctacttcacctatcctgcccggctgacgccgttggatacaccaaggaaagtctacacgaaccctttggcaaaatcctgtatatcgtgcgaaaaaggatggatataccgaaaaaatcgctataatgaccccgaagcagggttatgcagcggaaaagcgccacgcttcccgaagggagaaaggcggacaggtatccggtaagcggcagggtcggaacaggagagcgcacgagggagcttccagggggaaacgcctggtatctttatagtcctgtcgggtttcgccacctctgacttgagcgtcgatttttgtgatgctcgtcaggggggcggagcctatggaaaaacgccagcaacgcggcctttttacggttcctggccttttgctggccttttgctcacatgttctttcctgcgttatcccctgattctgtggataaccgtattaccgcctttgagtgagctgataccgctcgccgcagccgaacgaccgagcgcagcgagtcagtgagcgaggaagcggaagagcgccagaaggccgccagagaggccgagcgcggccgtgaggcttggacgctagggcagggcatgaaaaagcccgtagcgggctgctacgggcgtctgacgcggtggaaagggggaggggatgttgtctacatggctctgctgtagtgagtgggttgcgctccggcagcggtcctgatcaatcgtcaccctttctcggtccttcaacgttcctgacaacgagcctccttttcgccaatccatcgacaatcaccgcgagtccctgctcgaacgctgcgtccggaccggcttcgtcgaaggcgtctatcgcggcccgcaacagcggcgagagcggagcctgttcaacggtgccgccgcgctcgccggcatcgctgtcgccggcctgctcctcaagcacggccccaacagtgaagtagctgattgtcatcagcgcattgacggcgtccccggccgaaaaacccgcctcgcagaggaagcgaagctgcgcgtcggccgtttccatctgcggtgcgcccggtcgcgtgccggcatggatgcgcgcgccatcgcggtaggcgagcagcgcctgcctgaagctgcgggcattcccgatcagaaatgagcgccagtcgtcgtcggctctcggcaccgaatgcgtatgattctccgccagcatggcttcggccagtgcgtcgagcagcgcccgcttgttcctgaagtgccagtaaagcgccggctgctgaacccccaaccgttccgccagtttgcgtgtcgtcagaccgtctacgccgacctcgttcaacaggtccagggcggcacggatcactgtattcggctgcaactttgtcatgcttgacactttatcactgataaacataatatgtccaccaacttatcagtgataaagaatccgcgcgttcaatcggaccagcggaggctggtccggaggccagacgtgaaacccaacatacccctgatcgtaattctgagcactgtcgcgctcgacgctgtcggcatcggcctgattatgccggtgctgccgggcctcctgcgcgatctggttcactcgaacgacgtcaccgcccactatggcattctgctggcgctgtatgcgttggtgcaatttgcctgcgcacctgtgctgggcgcgctgtcggatcgtttcgggcggcggccaatcttgctcgtctcgctggccggcgccagatctggggaaccctgtggttggcatgcacatacaaatggacgaacggataaaccttttcacgcccttttaaatatccgattattctaataaacgctcttttctcttaggtttacccgccaatatatcctgtcaaacactgatagtttaaactgaaggcgggaaacgacaatctgatctctagga

SEQ ID NO: 207 - DNA, 10562 bp, synthetic construct
  source 1..10562: mol_type = other DNA; note = pCMP EcBioA binary vector
atgattcccgtgaccgccactcttattcgtcacaggttgaggcacttgcgtcatcgaattaggtttaaatcaacctctgtatcaccattccatttgccgctcaatcatcctacttatttgatttggtctgccaacactagcctgggcaaaactttggtcagtacggggatagcagccagttttctcttacaacaacctagttcatcagcaacaaaactattgtatctcaaacccatccagacaggttttcctagtgattctgactcaagatttgttttttcaaagctcgactcattgtcattgcgaagacaaattcctataagtatctcaaattccgtacttcattcatcactccctgctgctaagtctcttggcctaaatgttgaagtaagcgagtctggaatgtgtagtctcaattttcgggatgagaaaactgttaccggcgctccagagttgttgtgcaagacactttatgcttgggaggctgcaatttcaccccatcttgctgcagagagagaaaacgcaactgttgaagactctgtggttcttcaaatgattgagaagtgcctgaaggaggagatggagtgcggagttaaatctgagaagagtgatctcttgtgtctagtcgaaactgctggcggagttgcttctcctggtccatctggaaccttgcaatgtgacctgtataggccgtttaggctccccggaattctagttggagacggcaggttggggggtatctctggcacaatagcagcctatgagagtctcaagcttcgtggatacgatatcgctgctgttgtcttcgaagatcacggactagttaacgaagtgccacttacatcatatttgaggaataaggtacctgtcctcgtattacctcctgtccctaaagacccttcagacgacttgatcgaatggttcgtggagtccgatggcgtattcaaagcacttaaggagacgatggtattagcgaaccttgaacgtcttgaaaggttgaatggtatggccaaactggctggtgaagtgttttggtggccattcacacagcataagcttgttcaccaagagaccgtaactgtgattgactccagatgtggcgagaatttttctatttataaggcatcagataattcttctttgagtcaacagttcgatgcttgcgcaagttggtggacacaggggcctgaccctacttttcaggctgaattggctcgcgagatgggatacacagcggccaggttcggccatgtaatgttccccgaaaatgtttatgaacctgctcttaaatgtgctgagcttttgttagacggtgtaggaaagggatgggcttcacgcgtatacttctctgataatggctcaaccgcaatagagatcgctttgaagatggcttttaggaaattttgcgttgaccacaacttttgcgaagccacagaggaagagaaacacattgtggttaaggtaattgccctgagaggctcataccacggcgatactttgggtgctatggaggctcaggcgccatcaccatatactggttttcttcagcaaccctggtacacgggccggggcctatttttggatcctccaaccgtttttttgtctaacggttcttggaacatatctttgccggaaagtttctcagaaattgctcctgagtacggcaccttcacaagtcgtgatgaaatcttcgataagtcaagagacgcttcaacacttgcaagaatctattcagcttatctctcaaagcatttgcaggagcattcaggagttaggcagagtgcccatgttggtgcattaatcattgagccggtgattcatggtgcaggaggaatgcatatggtggatcctctatttcagagagtcctcgttaatgaatgtagaaatcgtaagatacctgtcatatttgacgaagtcttcactggtttttggagattgggagtggaaacgacaacagaacttctaggatgcaaacctgatattgcgtgctttgctaagctattgacgggcggtatggtacccttggctgtgacattggctacagatgcagttttcgatagttttagtggtgatagcaaattgaaagctctattgcacggacatagttactctgctcacgccatgggatgcgctaccgcggcgaaggcaatccaatggtttaaagatcctgaaaccaatcacaatatcacatctcaaggcaagaccctcagggaactgtgggacgaagaactagttcagcaaatctcttcacactcagcagtgcaacgcgttgttgtcataggaaccttgtttgctctcgagttgaaggcagacgcaagcaactcagggtacgcttcactctatgctaaatctttattgattatgttgagggaagatggcatctttacacgacctctgggtaacgtgatctacctcatgtgcggtccttgtacgagtcccgaaatatgtagacgactgctgactaaactgtataagcgtttgggtgaatttaatcgtacttaagagctctagatccccgaatttccccgatcgttcaaacatttggcaataaagtttcttaagattgaatcctgttgccggtcttgcgatgattatcatataatttctgttgaattacgttaagcatgtaataattaacatgtaatgcatgacgttatttatgagatgggtttttatgattagagtcccgcaattatacatttaatacgcgatagaaaacaaaatatagcgcgcaaactaggataaattatcgcgcgcggtgtcatctatgttactagatcgggaattgggtaccagatcatgagcggagaattaagggagtcacgttatgacccccgccgatgacgcgggacaagccgttttacgtttggaactgacagaaccgcaacgttgaaggagccactcagccgcgggtttctggagtttaatgagctaagcacatacgtcagaaaccattattgcgcgttcaaaagtcgcctaaggtcactatcagctagcaaatatttcttgtcaaaaatgctccactgacgttccataaattcccctcggtatccaattagagtctcatattcactctcaatccaaataatctgcaccggatctggatcgtttcgcatgattgaacaagatggattgcacgcaggttctccggccgcttgggtggagaggctattcggctatgactgggcacaacagacaatcggctgctctgatgccgccgtgttccggctgtcagcgcaggggcgcccggttctttttgtcaagaccgacctgtccggtgccctgaatgaactgcaggacgaggcagcgcggctatcgtggctggccacgacgggcgttccttgcgcagctgtgctcgacgttgtcactgaagcgggaagggactggctgctattgggcgaagtgccggggcaggatctcctgtcatctcaccttgctcctgccgagaaagtatccatcatggctgatgcaatgcggcggctgcatacgcttgatccggctacctgcccattcgaccaccaagcgaaacatcgcatcgagcgagcacgtactcggatggaagccggtcttgtcgatcaggatgatctggacgaagagcatcaggggctcgcgccagccgaactgttcgccaggctcaaggcgcgcatgcccgacggcgaggatctcgtcgtgacccatggcgatgcctgcttgccgaatatcatggtggaaaatggccgcttttctggattcatcgactgtggccggctgggtgtggcggaccgctatcaggacatagcgttggctacccgtgatattgctgaagagcttggcggcgaatgggctgaccgcttcctcgtgctttacggtatcgccgctcccgattcgcagcgcatcgccttctatcgccttcttgacgagttcttctgagcgggactctggggttcgaaatgaccgaccaagcgacgcccaacctgccatcacgagatttcgattccaccgccgccttctatgaaaggttgggcttcggaatcgttttccgggacgccggctggatgatcctccagcgcggggatctcatgctggagttcttcgcccacgggatctctgcggaacaggcggtcgaaggtgccgatatcattacgacagcaacggccgacaagcacaacgccacgatcctgagcgacaatatgatcgggcccggcgtccacatcaacggcgtcggcggcgactgcccaggcaagaccgagatgcaccgcgatatcttgctgcgttcggatattttcgtggagttcccgccacagacccggatgatccccgatcgttcaaacatttggcaataaagtttcttaagattgaatcctgttgccggtcttgcgatgattatcatataatttctgttgaattacgttaagcatgtaataattaacatgtaatgcatgacgttatttatgagatgggtttttatgattagagtcccgcaattatacatttaatacgcgatagaaaacaaaatatagcgcgcaaactaggataaattatcgcgcgcggtgtcatctatgttactagatcgtgcggccagcatggccgtatccgcaatgtgttattaagttgtctaagcgtcaatttgtttacaccacaatatatcctgccaccagccagccaacagctccccgaccggcagctcggcacaaaatcaccactcgatacaggcagcccatcagaattaaggatgaatgtcagctactgggctatctggacaagggaaaacgcaagcgcaaagagaaagcaggtagcttgcagtgggcttacatggcgatagctagactgggcggttttatggacagcaagcgaaccggaattgccagctggggcgccctctggtaaggttgggaagccctgcaaagtaaactggatggctttcttgccgccaaggatctgatggcgcaggggatcaagatctgatcaagagacaggatgaggatcgtttcgcatgagccatattcaacgggaaacgtcttgctctaggccgcgattaaattccaacatggatgctgatttatatgggtataaatgggctcgcgataatgtcgggcaatcaggtgcgacaatctatcgattgtatgggaagcccgatgcgccagagttgtttctgaaacatggcaaaggtagcgttgccaatgatgttacagatgagatggtcagactaaactggctgacggaatttatgcctcttccgaccatcaagcattttatccgtactcctgatgatgcatggttactcaccactgcgatccccggcaaaacagcattccaggtattagaagaatatcctgattcaggtgaaaatattgttgatgcgctggcagtgttcctgcgccggttgcattcgattcctgtttgtaattgtccttttaacagcgatcgcgtatttcgtctcgctcaggcgcaatcacgaatgaataacggtttggttgatgcgagtgattttgatgacgagcgtaatggctggcctgttgaacaagtctggaaagaaatgcataaacttttgccattctcaccggattcagtcgtcactcatggtgatttctcacttgataaccttatttttgacgaggggaaattaataggttgtattgatgttggacgagtcggaatcgcagaccgataccaggatcttgccatcctatggaactgcctcggtgagttttctccttcattacagaaacggctttttcaaaaatatggtattgataatcctgatatgaataaattgcagtttcatttgatgctcgatgagtttttctaagaattaattcatcccggggatctggctcgcggcggacgcacgacgccggggcgagaccataggcgatctcctaaatcaatagtagctgtaacctcgaagcgtttcacttgtaacaacgattgagaatttttgtcataaaattgaaatacttggttcgcatttttgtcatccgcggtcagccgcaattctgacgaactgcccatttagctggagatgattgtacatccttcacgtgaaaatttctcaagcgctgtgaacaagggttcagattttagattgaaaggtgagccgttgaaacacgttcttcttgtcgatgacgacgtcgctatgcggcatcttattattgaataccttacgatccacgccttcaaagtgaccgcggtagccgacagcacccagttcacaagagtactctcttccgcgacggtcgatgtcgtggttgttgatctagatttaggtcgtgaagatgggctcgagatcgttcgtaatctggcggcaaagtctgatattccaatcataattatcagtggcgaccgccttgaggagacggataaagttgttgcactcgagctaggagcaagtgattttatcgctaagccgttcagtatcagagagtttctagcacgcattcgggttgccttgcgcgtgcgccccaacgttgtccgctccaaagaccgacggtctttttgttttactgactggacacttaatctcaggcaacgtcgcttgatgtccgaagctggcggtgaggtgaaacttacggcaggtgagttcaatcttctcctcgcgtttttagagaaaccccgcgacgttctatcgcgcgagcaacttctcattgccagtcgagtacgcgacgaggaggtttatgacaggagtatagatgttctcattttgaggctgcgccgcaaacttgaggcagatccgtcaagccctcaactgataaaaacagcaagaggtgccggttatttctttgacgcggacgtgcaggtttcgcacggggggacgatggcagcctgagccaattcccagatccccgaggaatcggcgtgagcggtcgcaaaccatccggcccggtacaaatcggcgcggcgctgggtgatgacctggtggagaagttgaaggccgcgcaggccgcccagcggcaacgcatcgaggcagaagcacgccccggtgaatcgtggcaagcggccgctgatcgaatccgcaaagaatcccggcaaccgccggcagccggtgcgccgtcgattaggaagccgcccaagggcgacgagcaaccagattttttcgttccgatgctctatgacgtgggcacccgcgatagtcgcagcatcatggacgtggccgttttccgtctgtcgaagcgtgaccgacgagctggcgaggtgatccgctacgagcttccagacgggcacgtagaggtttccgcagggccggccggcatggccagtgtgtgggattacgacctggtactgatggcggtttcccatctaaccgaatccatgaaccgataccgggaagggaagggagacaagcccggccgcgtgttccgtccacacgttgcggacgtactcaagttctgccggcgagccgatggcggaaagcagaaagacgacctggtagaaacctgcattcggttaaacaccacgcacgttgccatgcagcgtacgaagaaggccaagaacggccgcctggtgacggtatccgagggtgaagccttgattagccgctacaagatcgtaaagagcgaaaccgggcggccggagtacatcgagatcgagctagctgattggatgtaccgcgagatcacagaaggcaagaacccggacgtgctgacggttcaccccgattactttttgatcgatcccggcatcggccgttttctctaccgcctggcacgccgcgccgcaggcaaggcagaagccagatggttgttcaagacgatctacgaacgcagtggcagcgccggagagttcaagaagttctgtttcaccgtgcgcaagctgatcgggtcaaatgacctgccggagtacgatttgaaggaggaggcggggcaggctggcccgatcctagtcatgcgctaccgcaacctgatcgagggcgaagcatccgccggttcctaatgtacggagcagatgctagggcaaattgccctagcaggggaaaaaggtcgaaaaggtctctttcctgtggatagcacgtacattgggaacccaaagccgtacattgggaaccggaacccgtacattgggaacccaaagccgtacattgggaaccggtcacacatgtaagtgactgatataaaagagaaaaaaggcgatttttccgcctaaaactctttaaaacttattaaaactcttaaaacccgcctggcctgtgcataactgtctggccagcgcacagccgaagagctgcaaaaagcgcctacccttcggtcgctgcgctccctacgccccgccgcttcgcgtcggcctatcgcggccgctggccgctcaaaaatggctggcctacggccaggcaatctaccagggcgcggacaagccgcgccgtcgccactcgaccgccggcgctgaggtctgcctcgtgaagaaggtgttgctgactcataccaggcctgaatcgccccatcatccagccagaaagtgagggagccacggttgatgagagctttgttgtaggtggaccagttggtgattttgaacttttgctttgccacggaacggtctgcgttgtcgggaagatgcgtgatctgatccttcaactcagcaaaagttcgatttattcaacaaagccgccgtcccgtcaagtcagcgtaatgctctgccagtgttacaaccaattaaccaattctgattagaaaaactcatcgagcatcaaatgaaactgcaatttattcatatcaggattatcaataccatatttttgaaaaagccgtttctgtaatgaaggagaaaactcaccgaggcagttccataggatggcaagatcctggtatcggtctgcgattccgactcgtccaacatcaatacaacctattaatttcccctcgtcaaaaataaggttatcaagtgagaaatcaccatgagtgacgactgaatccggtgagaatggcaaaagctctgcattaatgaatcggccaacgcgcggggagaggcggtttgcgtattgggcgctcttccgcttcctcgctcactgactcgctgcgctcggtcgttcggctgcggcgagcggtatcagctcactcaaaggcggtaatacggttatccacagaatcaggggataacgcaggaaagaacatgtgagcaaaaggccagcaaaaggccaggaaccgtaaaaaggccgcgttgctggcgtttttccataggctccgcccccctgacgagcatcacaaaaatcgacgctcaagtcagaggtggcgaaacccgacaggactataaagataccaggcgtttccccctggaagctccctcgtgcgctctcctgttccgaccctgccgcttaccggatacctgtccgcctttctcccttcgggaagcgtggcgctttctcatagctcacgctgtaggtatctcagttcggtgtaggtcgttcgctccaagctgggctgtgtgcacgaaccccccgttcagcccgaccgctgcgccttatccggtaactatcgtcttgagtccaacccggtaagacacgacttatcgccactggcagcagccactggtaacaggattagcagagcgaggtatgtaggcggtgctacagagttcttgaagtggtggcctaactacggctacactagaagaacagtatttggtatctgcgctctgctgaagccagttaccttcggaaaaagagttggtagctcttgatccggcaaacaaaccaccgctggtagcggtggtttttttgtttgcaagcagcagattacgcgcagaaaaaaaggatctcaagaagatcctttgatcttttctacggggtctgacgctcagtggaacgaaaactcacgttaagggattttggtcatgagattatcaaaaaggatcttcacctagatccttttgatccggaattaattcctgtggttggcatgcacatacaaatggacgaacggataaaccttttcacgcccttttaaatatccgattattctaataaacgctcttttctcttaggtttacccgccaatatatcctgtcaaacactgatagtttaaactgaaggcgggaaacgacaatctgatcatgagcggagaattaagggagtcacgttatgacccccgccgatgacgcgggacaagccgttttacgtttggaactgacagaaccgcaacgctgcaggaattggccgcagcggccatttaaatcaattgggcgcgtacgtagcactagtgcgcgatcgcttaattaagcggcgcgcctaaagcttctggcagacaaagtggcagacatactgtcccacaaatgaagatggaatctgtaaaagaaaacgcgtgaaataatgcgtctgacaaaggttaggtcggctgcctttaatcaataccaaagtggtccctaccacgatggaaaaactgtgcagtcggtttggctttttctgacgaacaaataagattcgtggccgacaggtgggggtccaccatgtgaaggcatcttcagactccaataatggagcaatgacgtaagggcttacgaaataagtaagggtagtttgggaaatgtccactcacccgtcagtctataaatacttagcccctccctcattgttaagggagcaaggatcctaaacc

SEQ ID NO: 208 - protein, 10 aa, synthetic construct
  source 1..10: note = motif 1
  VARIANT 2: note = X is H, Y or W
  VARIANT 5: note = X is A, Q, S or T
  VARIANT 7: note = X is H,Q or V
  VARIANT 8..10: note = X is any amino acid
WXPFXQXXXX

SEQ ID NO: 209 - skipped

SEQ ID NO: 210 - protein, 10 aa, synthetic construct
  source 1..10: note = motif 3
  VARIANT 3: note = X is A or G
  VARIANT 4: note = X is C, I, P or S
  VARIANT 5: note = X is A, G or S
  VARIANT 9: note = X is T, S or V
  VARIANT 10: note = X is I or Q
  VARIANT 1: note = X is F, I, L, V or Y
XDXXXSWWXX

SEQ ID NO: 211 - skipped

SEQ ID NO: 212 - protein, 24 aa, synthetic construct
  source 1..24: note = motif 5
  VARIANT 1: note = X is A or G or T
  VARIANT 2: note = X is F,L,T,Q or V
  VARIANT 4: note = X is G, N,D, E or R
  VARIANT 5: note = X is S, C or G
  VARIANT 11: note = X is L, I or M
  VARIANT 12: note = X is G or S
  VARIANT 13: note = X is A, C, S, T or V
  VARIANT 14: note = X is M, L or T
  VARIANT 15: note = X is D, E or N
  VARIANT 3: note = X is any amino acid
  VARIANT 16: note = X is any amino acid
  VARIANT 17: note = X is A,E,K,Q,R,S or T
  VARIANT 18: note = X is A, E, I, Q, V or T
  VARIANT 19: note = X is E,G,I,K,P or S
  VARIANT 20: note = X is C,E,N,S or T
  VARIANT 21: note = X is any amino acid
  VARIANT 22: note = X is F, T or Y
  VARIANT 24: note = X is any amino acid
  VARIANT 23: note = X is M, N, S or T
XXXXXYHGDTXXXXXXXXXXXXXX

SEQ ID NO: 213-215 - skipped (3 entries)

SEQ ID NO: 216 - protein, 10 aa, synthetic construct
  source 1..10: note = motif 9
  VARIANT 4: note = X is G or R
  VARIANT 7: note = X is F or Y
  VARIANT 8: note = X is N, S or T
  VARIANT 9: note = X is A, G or T
  VARIANT 10: note = X is H, N or Y
LLHXHSXXXX

SEQ ID NO: 217-218 - skipped (2 entries)

SEQ ID NO: 219 - protein, 10 aa, synthetic construct
  source 1..10: note = motif 12
  VARIANT 1: note = X is A,I,L,M,N or V
  VARIANT 2: note = X is F,H,L,Q or Y
  VARIANT 3: note = X is A,C,E,I,L,M,S or T
  VARIANT 5: note = X is A,I,P,S or V
  VARIANT 8: note = X is D,K,N,I,T or V
  VARIANT 9: note = X is F,I,L,M or V
XXXRXLGXXY

SEQ ID NO: 220-224 - skipped (5 entries)

SEQ ID NO: 225 - protein, 10 aa, synthetic construct
  source 1..10: note = motif
  VARIANT 5: note = X is A,Q,S or T
  VARIANT 7: note = X is H, Q or V
  VARIANT 8..9: note = X is any amino acid
  VARIANT 10: note = X is A,E,L,N or T
  VARIANT 2: note = X is H, Y or W
WXPFXQXXXX

SEQ ID NO: 226-227 - skipped (2 entries)

SEQ ID NO: 228 - protein, 10 aa, synthetic construct
  source 1..10: note = motif
  VARIANT 1: note = X is F,I,L,V or Y
  VARIANT 3: note = X is A or G
  VARIANT 4: note = X is D,M or T
  VARIANT 5: note = X is A, G or S
  VARIANT 9: note = X is T, S or V
  VARIANT 10: note = X is I or Q
XDXXXSWWXX

SEQ ID NO: 229 - protein, 10 aa, synthetic construct
  source 1..10: note = motif
  VARIANT 1: note = X is F,I,L,V or Y
  VARIANT 3: note = X is A or G
  VARIANT 4: note = X is C/I/P/S
  VARIANT 9: note = X is T, S or V
  VARIANT 10: note = X is I or Q
XDXXFSWWXX

SEQ ID NO: 230 - protein, 10 aa, synthetic construct
  source 1..10: note = motif
  VARIANT 1: note = X is F/I/L/V or Y
  VARIANT 3: note = X is A or G
  VARIANT 4: note = X is C, I, P or S
  VARIANT 5: note = X is A, G or S
  VARIANT 9: note = X is T, S or V
  VARIANT 10: note = X is I or Q
XDXXXCWWXX

SEQ ID NO: 231-232 - skipped (2 entries)

SEQ ID NO: 233 - protein, 10 aa, synthetic construct
  source 1..10: note = motif
  VARIANT 1: note = X is F/I/L/V or Y
  VARIANT 3: note = X is A or G
  VARIANT 4: note = X is C, I, P or S
  VARIANT 5: note = X is A, G or S
  VARIANT 10: note = X is I or Q
XDXXXSWWVX

SEQ ID NO: 234 - protein, 10 aa, synthetic construct
  source 1..10: note = motif
  VARIANT 1: note = X is F/I/L/V or Y
  VARIANT 3: note = X is A or G
  VARIANT 4: note = X is D, M or T
  VARIANT 7: note = X is F, L or M
  VARIANT 8: note = X is A/C/D/G/M or S
  VARIANT 10: note = X is I or Q
XDXXFCXXVX

SEQ ID NO: 235-238 - skipped (4 entries)

SEQ ID NO: 239 - protein, 24 aa, synthetic construct
  source 1..24: note = motif
  VARIANT 1: note = X is A, G or T
  VARIANT 2: note = F/L/T/Q or V
  VARIANT 3: note = X is any amino acid
  VARIANT 4: note = X is G/N/D/E or R
  VARIANT 11: note = X is L, I or M
  VARIANT 12: note = X is G or S
  VARIANT 13: note = X is A/C/S/T or V
  VARIANT 14: note = X is M, L or T
  VARIANT 15: note = X is D, E or N
  VARIANT 16: note = X is any amino acid
  VARIANT 17: note = X is A/E/K/Q/R/S or T
  VARIANT 18: note = X is A/E/I/Q/V or T
  VARIANT 19: note = X is E/G/I/K/P or S
  VARIANT 20: note = X is C/E/N/S or T
  VARIANT 21: note = X is any amino acid
  VARIANT 22: note = X is F, T or Y
  VARIANT 23: note = X is M/N/S or T
  VARIANT 24: note = X is any amino acid
XXXXAYHGDTXXXXXXXXXXXXXX

SEQ ID NO: 240 - protein, 24 aa, synthetic construct
  source 1..24: note = motif
  VARIANT 1: note = X is A, G or T
  VARIANT 2: note = X is F/L/T/Q or V
  VARIANT 3: note = X is any amino acid
  VARIANT 4: note = X is G/N/D/E or R
  VARIANT 5: note = X is S,C or G
  VARIANT 11: note = X is L, I or M
  VARIANT 12: note = X is G or S
  VARIANT 13: note = X is A/C/S/T/V
  VARIANT 14: note = X is M/L/T
  VARIANT 15: note = X is D, E or N
  VARIANT 16: note = X is any amino acid
  VARIANT 17: note = X is A/E/K/Q/R/S/T
  VARIANT 18: note = X is A/E/I/Q/V/T
  VARIANT 19: note = X is E/G/I/K/P/S
  VARIANT 20: note = X is C/E/N/S/T
  VARIANT 21: note = X is any amino acid
  VARIANT 22: note = X is F, T or Y
  VARIANT 23: note = X is M, N, S or T
  VARIANT 24: note = X is any amino acid
XXXXXYSGDTXXXXXXXXXXXXXX

SEQ ID NO: 241 - protein, 24 aa, synthetic construct
  source 1..24: note = motif
  VARIANT 1: note = X is A, G or T
  VARIANT 2: note = X is F/L/T/Q or V
  VARIANT 3: note = X is any amino acid
  VARIANT 4: note = X is G/N/D/E/R
  VARIANT 5: note = X is S, C or G
  VARIANT 11: note = X is L, I or M
  VARIANT 12: note = X is G or S
  VARIANT 13: note = A/C/S/T/V
  VARIANT 14: note = X is M/L/T
  VARIANT 15: note = X is D, E or N
  VARIANT 16: note = X is any amino acid
  VARIANT 18: note = X is A/E/I/Q/V/T
  VARIANT 19: note = X is E/G/I/K/P/S
  VARIANT 20: note = X is C/E/N/S/T
  VARIANT 21: note = X is any amino acid
  VARIANT 22: note = X is F, T or Y
  VARIANT 23: note = X is M, N, S or T
  VARIANT 24: note = X is any amino acid
XXXXXYHGDTXXXXXXAXXXXXXX

SEQ ID NO: 242 - protein, 24 aa, Synthetic construct
  source 1..24: note = motif
  VARIANT 1: note = X is A, G or T
  VARIANT 2: note = X is F/L/T/Q/V
  VARIANT 3: note = X is any amino acid
  VARIANT 4: note = X is G/N/D/E/R
  VARIANT 5: note = X is S/C/G
  VARIANT 11: note = X is L, I or M
  VARIANT 12: note = X is G or S
  VARIANT 13: note = X is A/C/S/T/V
  VARIANT 14: note = X is M, L or T
  VARIANT 15: note = X is D, E or N
  VARIANT 16: note = X is any amino acid
  VARIANT 17: note = X is A/E/K/Q/R/S/T
  VARIANT 18: note = X is K or S
  VARIANT 19: note = X is E/G/I/K/P/S
  VARIANT 20: note = X is C/E/N/S/T
  VARIANT 21: note = X is any amino acid
  VARIANT 22: note = X is F, T or Y
  VARIANT 23: note = X is M/N/S/T
  VARIANT 24: note = X is any amino acid
XXXXXYHGDTXXXXXXXXXXXXXX

SEQ ID NO: 243 - protein, 24 aa, synthetic construct
  source 1..24: note = motif
  VARIANT 1: note = X is A, G or T
  VARIANT 2: note = X is F/L/T/Q/V
  VARIANT 3: note = X is any amino acid
  VARIANT 4: note = X is G/N/D/E/R
  VARIANT 5: note = X is S, C or G
  VARIANT 11: note = X is L, I or M
  VARIANT 12: note = X is G or S
  VARIANT 13: note = X is A/C/S/T/V
  VARIANT 14: note = X is M,L or T
  VARIANT 15: note = X is D, E or N
  VARIANT 16: note = X is any amino acid
  VARIANT 17: note = X is A/E/K/Q/R/S/T
  VARIANT 18: note = X is A/E/I/Q/V/T
  VARIANT 19: note = X is DELETION/L/T
  VARIANT 20: note = X is C/E/N/S/T
  VARIANT 21: note = X is any amino acid
  VARIANT 22: note = X is F/T/Y
  VARIANT 23: note = X is M, N, S or T
  VARIANT 24: note = X is any amino acid
XXXXXYHGDTXXXXXXXXXXXXXX

SEQ ID NO: 244 - protein, 24 aa, synthetic construct
  source 1..24: note = motif
  VARIANT 1: note = X is A/G/T
  VARIANT 2: note = X is F/L/T/Q/V
  VARIANT 3: note = X is any amino acid
  VARIANT 4: note = X is G/N/D/E/R
  VARIANT 5: note = X is S/C/G
  VARIANT 11: note = X is L, I or M
  VARIANT 12: note = X is G or S
  VARIANT 13: note = X is A/C/S/T/V
  VARIANT 14: note = X is M/L/T
  VARIANT 15: note = X is D, E or N
  VARIANT 16: note = X is any amino acid
  VARIANT 17: note = X is A/E/K/Q/R/S/T
  VARIANT 18: note = X is A/E/I/Q/V/T
  VARIANT 19: note = X is E/G/I/K/P/S
  VARIANT 20: note = X is A/C/D/E/F/G/H/I/K/L/M/N/Q/R/S/T/V/W/Y
  VARIANT 21: note = X is any amino acid
  VARIANT 22: note = X is F/T/Y
  VARIANT 23: note = X is M/N/S/T
  VARIANT 24: note = X is any amino acid
XXXXXYHGDTXXXXXXXXXXXXXX

SEQ ID NO: 245 - protein, 24 aa, synthetic construct
  source 1..24: note = motif
  VARIANT 1: note = X is A/G/T
  VARIANT 2: note = X is F/L/T/Q/V
  VARIANT 3: note = X is any amino acid
  VARIANT 4: note = X is G/N/D/E/R
  VARIANT 5: note = X is S/C/G
  VARIANT 11: note = X is L/I/M
  VARIANT 12: note = X is G or S
  VARIANT 13: note = X is A/C/S/T/V
  VARIANT 14: note = X is M/L/T
  VARIANT 15: note = X is D, E or N
  VARIANT 16: note = X is any amino acid
  VARIANT 17: note = X is A/E/K/Q/R/S/T
  VARIANT 18: note = X is A/E/I/Q/V/T
  VARIANT 19: note = X is E/G/I/K/P/S
  VARIANT 20: note = X is C/E/N/S/T
  VARIANT 21: note = X is A/C/E/L/Q/V
  VARIANT 22: note = X is F/T/Y
  VARIANT 23: note = X is M/N/S/T
  VARIANT 24: note = X is any amino acid
XXXXXYHGDTXXXXXXXXXXXXXX

SEQ ID NO: 246 - protein, 24 aa, synthetic construct
  source 1..24: note = motif
  VARIANT 1: note = X is A, G or T
  VARIANT 2: note = X is F/L/T/Q/V
  VARIANT 3: note = X is any amino acid
  VARIANT 4: note = X is G/N/D/E/R
  VARIANT 5: note = X is S/C/G
  VARIANT 11: note = X is L/I/M
  VARIANT 12: note = X is G or S
  VARIANT 13: note = X is A/C/S/T/V
  VARIANT 14: note = X is M/L/T
  VARIANT 15: note = X is D/E/N
  VARIANT 16: note = X is any amino acid
  VARIANT 17: note = X is A/E/K/Q/R/S/T
  VARIANT 18: note = X is A/E/I/Q/V/T
  VARIANT 19: note = X is E/G/I/K/P/S
  VARIANT 20: note = X is C/E/N/S/T
  VARIANT 21: note = X is any amino acid
  VARIANT 22: note = X is C/D/E/F/H/I/K/M/P/Q/R/V/W
  VARIANT 23: note = X is M/N/S/T
  VARIANT 24: note = X is any amino acid
XXXXXYHGDTXXXXXXXXXXXXXX

SEQ ID NO: 247 - protein, 24 aa, synthetic construct
  source 1..24: note = motif
  VARIANT 1: note = X is A, G or T
  VARIANT 2: note = X is F/L/T/Q/V
  VARIANT 3: note = X is any amino acid
  VARIANT 4: note = X is G/N/D/E/R
  VARIANT 5: note = X is S/C/G
  VARIANT 11: note = X is L/I/M
  VARIANT 12: note = X is G or S
  VARIANT 13: note = X is A/C/S/T/V
  VARIANT 14: note = X is M/L/T
  VARIANT 15: note = X is D/E/N
  VARIANT 16: note = X is any amino acid
  VARIANT 17: note = X is A/E/K/Q/R/S/T
  VARIANT 18: note = X is A/E/I/Q/V/T
  VARIANT 19: note = X is E/G/I/K/P/S
  VARIANT 20: note = X is C/E/N/S/T
  VARIANT 21: note = X is any amino acid
  VARIANT 22: note = X is F/T/Y
  VARIANT 23: note = X is C/D/G/I/N/Q/R/V/W
  VARIANT 24: note = X is any amino acid
XXXXXYHGDTXXXXXXXXXXXXXX

SEQ ID NO: 248 - protein, 24 aa, Synthetic construct
  source 1..24: note = motif
  VARIANT 1: note = X is A/G/T
  VARIANT 2: note = X is F/L/T/Q/V
  VARIANT 3: note = X is any amino acid
  VARIANT 4: note = X is G/N/D/E/R
  VARIANT 5: note = X is S/C/G
  VARIANT 11: note = X is L/I/M
  VARIANT 12: note = X is G or S
  VARIANT 13: note = X is A/C/S/T/V
  VARIANT 14: note = X is M/L/T
  VARIANT 15: note = X is D,E or N
  VARIANT 16: note = X is any amino acid
  VARIANT 17: note = X is A/E/K/Q/R/S/T
  VARIANT 18: note = X is A/E/I/Q/V/T
  VARIANT 19: note = X is E/G/I/K/P/S
  VARIANT 20: note = X is C/E/N/S/T
  VARIANT 21: note = X is any amino acid
  VARIANT 22: note = X is F/T/Y
  VARIANT 23: note = X is M/N/S/T
  VARIANT 24: note = X is DELETION/A/L/P
XXXXXYHGDTXXXXXXXXXXXXXX

SEQ ID NO: 249 - protein, 24 aa, Synthetic construct
  VARIANT 1: note = X is A, G or T
  VARIANT 2: note = X is F/L/T/Q/V
  VARIANT 3: note = X is any amino acid
  VARIANT 4: note = X is G/N/D/E/R
  VARIANT 11: note = X is L, I or M
  VARIANT 12: note = X is G or S
  VARIANT 13: note = X is A/C/S/T/V
  VARIANT 14: note = X is M/L/T
  VARIANT 15: note = X is D, E or N
  VARIANT 16: note = X is any amino acid
  VARIANT 18: note = X is K or S
  VARIANT 19: note = X is DELETION/L/T
  VARIANT 20: note = X is A/C/D/E/F/G/H/I/K/L/M/N/Q/R/S/T/V/W/Y
  VARIANT 21: note = X is A/C/E/L/Q/V
  VARIANT 22: note = X is C/D/E/F/H/I/K/M/P/Q/R/V/W
  VARIANT 23: note = X is C/D/G/I/N/Q/R/V/W
  VARIANT 24: note = X is DELETION/A/L/P
XXXXAYSGDTXXXXXXAXXXXXXX

SEQ ID NO: 250-259 - skipped (10 entries)

SEQ ID NO: 260 - protein, 10 aa, synthetic construct
  source 1..10: note = motif
  VARIANT 4: note = X is A, C or S
  VARIANT 7: note = X is F or Y
  VARIANT 8: note = X is N/S/T
  VARIANT 9: note = X is A/G/T
  VARIANT 10: note = X is H/N/Y
LLHXHSXXXX

SEQ ID NO: 261 - protein, 10 aa, synthetic construct
  source 1..10: note = motif
  VARIANT 4: note = X is G or R
  VARIANT 7: note = X is F or Y
  VARIANT 8: note = X is H or P
  VARIANT 9: note = X is A/G/T
  VARIANT 10: note = X is H/N/Y
LLHXHSXXXX

SEQ ID NO: 262 - protein, 10 aa, synthetic construct
  source 1..10: note = motif
  VARIANT 4: note = X is A/C/S
  VARIANT 7: note = X is F or Y
  VARIANT 8: note = X is H or P
  VARIANT 9: note = X is A/G/T
  VARIANT 10: note = X is H/N/Y
LLHXHSXXXX

SEQ ID NO: 263-266 - skipped (4 entries)

SEQ ID NO: 267 - protein, 10 aa, synthetic construct
  source 1..10: note = motif
  VARIANT 1: note = X is A/I/L/M/N/V
  VARIANT 2: note = X is F/H/L/Q/Y
  VARIANT 3: note = X is A/C/E/I/L/M/S/T
  VARIANT 5: note = X is A/I/P/S/V
  VARIANT 8: note = X is D/K/N/I/T/V
  VARIANT 9: note = X is F/I/L/M/V
XXXQXLGXXY

SEQ ID NO: 268 - skipped

SEQ ID NO: 269 - protein, 15 aa, synthetic construct
  source 1..15: note = motif
  VARIANT 3: note = X is I or V
  VARIANT 4: note = X is A/F/L/M
  VARIANT 5: note = X is T or V
  VARIANT 7: note = X is F/L/W
  VARIANT 9: note = X is K or R
  VARIANT 10: note = X is C/S/T
  VARIANT 12: note = X is A/E/K/L/Q/P/R/S/T
  VARIANT 13: note = X is F/L/M/N/R/W
  VARIANT 15: note = X is A/G/S
DEXXXGXGXXGXXFX

SEQ ID NO: 270 - skipped

SEQ ID NO: 271 - protein, 827 aa, Hordeum vulgare
MLRRLLLRHARRLHYSSSFSSALPLSSPTFAVFGANTGVGKTLVSAGLAASLLRSHAASPSAVLYLKPLQTGFPDDSDAGFLYRRVPALLRPSHAAHLAASIDTLSPAPSVETQSPSREEAAFSYDGEGEAVRKLLACRTLYAWREAVSPHLAAEREGMAVEDAHVRSLLAACLVEGENLGKGEGDVWKLVETAGGVASPGPSGTLQCDLYRQFRLPTILVGDGRLGGISCTLSAYETLLLRGYDVSAVILEDHGLSNNKFLLSYLRNRVPVLVLPPIPEDPSDDLTDWFSESSSVFGLLEDALRSFHLTRIQRLNSMQRKSKDLLWWPFTQHNLVPVDCVTVIDSRCGESFSAYKVKDNKMMMIPQFDACASWWTQGPDSKLQIELARDMGYAAARYGHVMFPENAHEPALRCAELLLGGIGKDWASRVYYSDNGSTAIEIALKMAFRKFSLDRGILLDSDKSIITNGRNIQLKVLALKGSYHGDTLGAMEAQAPSAYTSFLQQPWYSGRGLFLDPPTVFIKNGTCTLSLPQAIQNCHLSPGDKCFPSLAEVFCKTRDSSSAADLYSTYISQQLSEYSLSSNTEHIAALIIEPVIQGAGGMHMIDPLFQRVLVHECRDRKIPVIFDEVFTGFWRLGVESASELLGCLPDVACYAKLMTGGLVPLAATVTTEAVFEAFKSDSKLTALLHGHSYTAHAMGCSAAVKAIQWFRDPSTNSNLDFDCMKLKELWDGTLVNQLSSLPNVKRIVSLGTLCAIELQAEGSDAGYASLYARSLIQQLREEDDIYVRPLGNVIYLMCGPCTTRDVCTEQLSKVYRRISHFNPVHRG

SEQ ID NO: 272 - protein, 838 aa, Brassica napus
MSPVTATLLRHRLRHLRHHHIRLNSTAVPSHFNLPLNHPTYLIWSANTSLGKTLVSTGIASSFLLHQPSSSPPAAHSAKLLYLKPIQTGFPSDSDSRFVFSKLDSLSLRRRIPLSVSNSVLRSSLPVAESMRRNIKVSESGMCDLNFREEKTVTGAPELLCKTLYAWEAAISPHLAAEREHATVEDSVVLKMVEQEMECGSKANVLCLVETAGGVASPGPSGTLQCDLYRPFRLPGILVGDGRLGGISGTIAAYESLKLRGYDVAAVVFEDHGLVNEVPLTSYLRNKVPVLVLPPVPKDPSDDLIEWFVESDGVFKALKEVMVSVYLERVERLNGMAKQAGEVFWWPFTQHKLVPEDNVTIIDSRCGENFSVFKASDNNSITQQFDACASWWTQGPDPAFQAELAREMGYTAARFGHVMFPENVYEPALKCAELLLDGVGKGWASRVYFSDNGSTAIEIGLKMAFRKFCVDHETLFGLSEDAEEKKHVDVKVLALRGSYHGDTLGAMEAQAPSPYTGFLQQPWYTGRGLFLEPPTVFLSNGTWNLSLPESFSQTASEECGTFTTRDEIFDKSRDTSVLATVYSTYVSEQLQEYSGISQSAHVGALIIEPVIHGAGGMHMVDPLFQRVLVNECRNRKIPVIFDEVFTGFWRLGVETTADLLGCKPDIACFAKLLTGGMIPLAVTLATDAVFDSFSGDSKLKALLHGHSYSAHAMGCATATKAIEWFKDPETNHNIDSQRGTLRELWDEELVQHISCHCAVERVVVLGTLFALELKVDASNSGYASLYAKSLLEMLREDGIFMRPLGNVVYLMCGPCTSPEICRRLLTKLHKRLGEFNRA

SEQ ID NO: 273 - protein, 858 aa, Gossypium hirsutum
MLLRRHHHHRLFRLRLLLLHHHHHQFQSFSTLTIPLSHPTYIIWSSNTSLGKTLVSTGLSSSFLLSPSSSSKKFLYLKPLQTGFPSDSDSRFLFQKLSSLSLSRNLPLFSSHSVLLSSLPAAKSFKPNEFSLNESREMCELGFYEEKKVLEAGRVAPELVSETIYAWEGALSPHFAAEREGGAVEDSELVKRLETRLKEGLLEGGVERGKLDGFCVVETAGGVASPGPSGTLQCDLYRPLRFPGVLVGDGRLGGISGTISAYESLKLRGYDVVAIVIEDHGLINEIPLKSYLRSRVPVFVLPPIPQDPSNDLMEWFDESCNVFNSLKDIMLEAYLERMRRLNEMPRKAGDVFWWPFTQHKLVPPSTVTVIDSRCGENFSVYKVQNKEYITQQFDACASWWTQGPDATLQTELARDMGYAAARFGHVMFPENVYEPALECAELLLDGVGKGWATRVYFSDNGSTAIEIALKMAFRKFSSDHGILPELLKNNPTESCTELMVLALKGSYHGDTLGAMEAQAPSSFTGFLQQPWYTGRGLFLDPPTVFMHNGKWTVSLPEVFHSATLKPEDTTFRSRDEIFLKSRDESNLAGLYSLYVSQQLSQYSTLSETNKQIGALIMEPIIQGAGGMHMVDPLFQRMLVNECRHCRIPVIFDEVFTGFWRLGVESAAELLGCVPDIACFAKLMTGGIIPLAATMATDAIFDSFTGDSKLKALLHGHSYSAHAMGCTAAAKSIKWFKDPNTNLNITSEKSQKMLLRELWDAELVQQFSSHPSISRVVTLGTLFALELQADESDAGYASLYARSLVQMLREDCIYTRPLGNVIYVMCGPCTSPKMCTLQLLKLYTKLEEFTLVKTKMNII

SEQ ID NO: 274 - protein, 821 aa, Oryza sativa
MLRLLRHARRHSTSSSSSAAAAAVPLTSPAFAVFGANTGVGKTLVSAGLVASLLASPSPSPSTVAYLKPLQTGFPDDSDARFVFDRAPALLRRLRLAGGGASTRLVASNHTLFPSPAVDPLPERQDTVVNYGGEEGVEEKALVCRTVYAWREPVSPHLAAEREGMPVEDEEVRWLVDRWLAEEDGGGEVWKVLETAGGVASPGPSGTLQCDLYRSSRLPAVLVGDGRLGGISSTLSAYETLLLRGYDVGSVILEDRGLSNDRFLLSYLRKRVPVHVLPPIPEDPKDDLTDWFSESSSAFSSLKDSLQSFHSRRVQRLNSMQRKSKYLLWWPFTQHDLVPVDSVTVIDSRFGENFSAYKVKDKTIVPQFDACASWWTQGPDSNLQIELARDMGYAAARYGHVMFPENVHEPALRCAELLLGGVGKDWASRVYFSDNGSTAIEIALKMAFRKYACDHGIIVDSEKDIRSEGSVHFKVLALNGSYHGDTLGAMEAQAPSAYTSFLQQPWYSGRGLFLDPPTVYIKNKSANLSLPPSIMHDQLSSCDTCFSSLTEVFCKTRDTSSAANVYVSYISQQLSQYAMSNNSEHIAALIIEPVIQGAGGMHLIDPLFQRLLVKECKNRKIPVIFDEVFTGFWRLGVESASELLGCFPDISCYAKLMTGGIVPLAATLATEPIFEAFRSDSKLTALLHGHSYTAHPMGCTAAVKAIQWYKDPSTNSNIDLDRMKLKELWDSALVNHLSSLPNVKRVVSLGTLCAIELKAEGSDAGYASLYASSLIRQLREEDNIYARPLGNVIYLMCGPCTTQDSCTRQLAKVHRRLQKLN

SEQ ID NO: 275 - protein, 821 aa, Glycine max
MFRFPSVLLSRRLHRRELSSSTTSHPPSLPLSHPIYLIWGSNTGVGKTLVSAGIAAAFLLSSPTPSQFHYLKPLQTGFPSDSDSRFVFNKLRQLSLIRNPHIPLSASHRVINVSPAVTASNPLAGEEGVGPPPELLCKTLYAWEEAVSPHLAAEREGLVVKDSAVLETLGECLEDVAECGAGKERSEVLCVVETAGGVASPGPSGSLQCDLYRPFRIPAVLVGDGRLGGISGTISAYESLKLRGYDVVAVVFEDHGLLNEGPLMSYMRNKVPVLVLPPIPKDPLNDLMEWFESSHYIFSNLKEIMLSAYFERIKKLHDMPREARDIIWWPFTQHKLVPDGGVTVIDSRCGENFSIFKVQKTEVIAPQFDACASWWTQGPDAIMQTELAREMGYAAARFGHVMFPENVHEPALNCAELLLQGVGKGWASRTYFSDNGSTAIEIALKMAFRKFSVDHGLIVHCHEDTTNERSTELMVLALQRSYHGDTLGAMEAQAPSSYTGFLQQPWYTGRGLFLDPPSVFMHNSTWNVSIPEGYHLESLKGKSITFASPDEIFHKGRDKSELATVYSSYISKVLSGFRGSNNVGALIMEPVIQGAGGMHMVDPLFQRVLVNECRSRKIPVIFDEVFTGFWRLGVETAVELIHCVPDIACFGKLLTGGIIPLAVTLATNAVFDSFIGDSKLKALLHGHSYSAHAMGCAAAVKSIQWFKDPCSNPNITSEGRLLRELWDDKMVHRISSHPAIQRVVALGTLCALELKAEGNNAGYGSLYARPLLEKLREDGVYMRPLGNVIYLLCGPCTSPEVCNQLLVKLLRRLEEFDVGKN

SEQ ID NO: 276 - protein, 824 aa, Triticum aestivum
MLRRLLLRQARRRHCSSSFSSALPLSSPTFAVFGANTGVGKTLVSAGLAASLLRSHAASPSAVLYLKPLQTGFPADSDAGFLYRRVPALVRPSHAAHLVASIDTLSPAPSVETPSPSREEAAFSYDGEGKAVRKLLACRTLYAWREAVSPHLAAEREGMTVEDAHVRSLLAACLAEGETLGKGEGDVWKLVETAGGVASPGPSGTLQCDLYRHFRLPIILVGDGRLGGISGTLSAYETLLLRGYDVSAVILEDCGLSNDKFLLSYLRNRVPVLVLPPIPEDPSDDLTDWFSESSSVFGLLEDALRSFHLKRIQRLNSMQRKSKDLLWWPFTQHNLVPVDCVTVIDSRCGESFSAYKVKDNKLMMIPQFDACASWWTQGPDSKLQIELARDMGYAAARYGHVMFPENAHEPALRCAELLLGGIGKDWASRVYYSDNGSTAIEIALKMAFRKFSLDRGILLDSDKSITNERNIQLKVLALKGSYHGDTLGAMEAQAPSAYTSFLQQPWYSGRGLFLDPPTVFIRNGTCALSLPQSIQNCHLSPGDKCFPSFAEVFCKSRDSSAAADLYSTYISQQLSEYSMSSNTEHIAALIIEPVIQGAGGMHMIDPLFQRVLVHECRDRKIPVIFDEVFTGFWRLGVESASELLGCLPDVACYAKLMTGGIVPLAATVTTEAVFEAFKSDSKLTALLHGHSYTAHAMGCSAAVKAIQWFRDPSTNSNLDFDCMKLKELWDGTLVNQLSSLPNVKRVVSLGTLCAIELQAEGSDAGYASLYARSLIQQLREEDDIYVRPLGNVIYLMCGPCTTRDVCTEQLSKVYRRISHFNPIH

SEQ ID NO: 277 - protein, 22 aa, synthetic construct
  source 1..22: note = MTP
MIPVTATLIRHRLRHLRHRIRF

SEQ ID NO: 278 - protein, 108 aa, synthetic construct
  source 1..108: note = MTP
MVRRLFLHHARRRLHSGTASSIPLSTPIFAIFGANTGVGKTLVSAGLATALLSSPSPAVSSVAYLKPLQTGYPVDSDASFVFSRTPALLRAFPPCRATRLIASCRTFF

SEQ ID NO: 279 - protein, 26 aa, synthetic construct
  source 1..26: note = MTP
MASLALTRRRFNPVSRLSLHKCRSTF

SEQ ID NO: 280 - protein, 51 aa, synthetic construct
  source 1..51: note = MTP
MHLLLLLPLRRRCTNPIAPRIAHQSRFLVSTAGACSPLPRHLLSGIWGRCL

SEQ ID NO: 281 - protein, 15 aa, Synthetic construct
  source 1..15: note = MTP
MLPRLLLRSRHRRRY

SEQ ID NO: 282 - protein, 32 aa, synthetic construct
  source 1..32: note = MTP
MPSCPLLPLLPRRRPPPSPLLLLLLSRSLHSS

SEQ ID NO: 283 - protein, 35 aa, synthetic construct
  source 1..35: note = MTP
MSAPIARRASSVARGRTRWLTSTSIERSREWFVRS

SEQ ID NO: 284 - protein, 22 aa, Synthetic construct
  source 1..22: note = MTP
MFHPPLLFTLSRHFLRRHHHRH

SEQ ID NO: 285 - protein, 21 aa, Synthetic construct
  source 1..21: note = MTP
MYFLISLHRRGHRHLRHVKDL

SEQ ID NO: 286 - protein, 31 aa, Synthetic construct
  source 1..31: note = MTP
MLTLSMRMRPRTLMKMSFSTRAGLGQLGCLT

SEQ ID NO: 287 - protein, 33 aa, Synthetic construct
  source 1..33: note = MTP
MAPVPALLWRSLRTHQVYGANTDVGKTIFSTVL

SEQ ID NO: 288 - protein, 15 aa, Synthetic construct
  source 1..15: note = MTP
MLRRLLLRHARRLHY

SEQ ID NO: 289 - protein, 24 aa, Synthetic construct
  source 1..24: note = MTP
MSPVTATLLRHRLRHLRHHHIRLN

SEQ ID NO: 290 - protein, 29 aa, Synthetic construct
  source 1..29: note = MTP
MLLRRHHHHRLFRLRLLLLHHHHHQFQSF

SEQ ID NO: 291 - protein, 11 aa, synthetic construct
  source 1..11: note = MTP
MLRLLRHARRH

SEQ ID NO: 292 - protein, 18 aa, Synthetic construct
  source 1..18: note = MTP
MFRFPSVLLSRRLHRREL

SEQ ID NO: 293 - protein, 24 aa, synthetic construct
  source 1..24: note = MTP
MLRRLLLRQARRRHCSSSFSSALP

SEQ ID NO: 294 - protein, 812 aa, Synthetic construct
MKSTSVSPFHLPLNHPTYLIWSANTSLGKTLVSTGIAASFLLQQPSSSATKLLYLKPIQTGFPSDSDSRFVFSKLDSLSLRRQIPISISNSVLHSSLPAAKSLGLNVEVSESGMCSLNFRDEKTVTGAPELLCKTLYAWEAAISPHLAAERENATVEDSVVLQMIEKCLKEEMECGVKSEKSDLLCLVETAGGVASPGPSGTLQCDLYRPFRLPGILVGDGRLGGISGTIAAYESLKLRGYDIAAVVFEDHGLVNEVPLTSYLRNKVPVLVLPPVPKDPSDDLIEWFVESDGVFKALKETMVLANLERLERLNGMAKLAGEVFWWPFTQHKLVHQETVTVIDSRCGENFSIYKASDNSSLSQQFDACASWWTQGPDPTFQAELAREMGYTAARFGHVMFPENVYEPALKCAELLLDGVGKGWASRVYFSDNGSTAIEIALKMAFRKFCVDHNFCEATEEEKHIVVKVIALRGSYHGDTLGAMEAQAPSPYTGFLQQPWYTGRGLFLDPPTVFLSNGSWNISLPESFSEIAPEYGTFTSRDEIFDKSRDASTLARIYSAYLSKHLQEHSGVRQSAHVGALIIEPVIHGAGGMHMVDPLFQRVLVNECRNRKIPVIFDEVFTGFWRLGVETTTELLGCKPDIACFAKLLTGGMVPLAVTLATDAVFDSFSGDSKLKALLHGHSYSAHAMGCATAAKAIQWFKDPETNHNITSQGKTLRELWDEELVQQISSHSAVQRVVVIGTLFALELKADASNSGYASLYAKSLLIMLREDGIFTRPLGNVIYLMCGPCTSPEICRRLLTKLYKRLGEFNRT

SEQ ID NO: 295 - protein, 712 aa, Synthetic construct
MQSPAVEAKAESLHESQEKVVTYGAGAAEQTKVLACCTAYAWREPVSPHLAAEREGMAAGDDEVKGCVEQWLLEEGIGEGGEVWKILETAGGVASPSASGTLQCDLYRPFRLPAILVGDGRLGGISSTLSAYETLLLRGYDVSAVILEDRELSNDKFLLSYLRNRVHVLILPQIPEDPLDDLTDWFSESSSIFIFLKDELQSFHSRRIERLNSMQRKSKALLWWPFTQHNLVPQDSVTVIDSRYGENFSVYKIKDKMLIPQFDACASWWTQGPDSNLQIELARDMGYAAARYGHVMFPENVHEPALHSAEVLLGGVGKGWASRVYYSDNGSTAIEIALKMAFRKFSLDHGIMASSENSTRNERNIQLKVLALNGSYHGDTLGAMEAQAPSAYTSFLQQPWYSGRGLFLDPPTVYIKSEVYNISLPQSMQHDPQTYGFFSQAEVFCKTRDKTFAADLYSSYIKQKLSEFSLSSSSEHLAALIIEPVIQGAGGMLMIDPLFQRVLVSECRSRKIPVIFDEVFTGFWRLGVESASELLGCLPDIACYAKLMTGGIIPLAATLATEEVFESFESDSKLTALLHGHSYTAHAMGCTAALKAMQWYRGPSTNSNLDTDHMKLKELWDGTLVKQLSSLPNVKRVVSLGTLCAIELKAEGADAGYASLYASSLVQQLRKEDDIYIRPLGNVIYLMCGPCTPRDSCTRQLLKVHRRLCALN

SEQ ID NO: 296 - protein, 786 aa, Synthetic construct
MSRSGQAGEDRTPKQKLHIPSGFEVDLSHPTYVIWGSNTGVGKTLVSTGLAASLLNASQNLLYVKPVQTGFPQDSDSRYVSHKVKDILKQRKPSNNVHISHQVLKASPRAWELLPGSKGFGEVASYERAIQGMRNVCDYEGQTVQGLYKGLADLKLVCKTIYGWYEAVSPHLAAAGEKCSVDDCEVVENLQNSLREFNVDENNTNRWSIIETAGGVASPGPSGTLQCDLYRPFRLPSILVGDGRLGGISGTISAYETLCIRGYDICAVILADTGLSNEKCLSTYLHDRVPVFVLPKIPDDTNNTLLEWFSESYKVFSEIKDTLQTSYFKRIYRLHEMPMKARQILWWPFTQHSLVTEQSISLIDSRFGENFGVYKGKNHKDVKESIVQQFDACASWWTQGPSAILQTELAREVGYTTGRFGHVMYPENVYEPALHCAELLLEGVGKGWATRVFLSDNGSTAIEISLKMAFRKFAFDHGFLPEHFNEDLRKICPQFKVEIGTISYTTCAFFIEMTMEEFSEESYTGRGLFLDPPTVFLHNEEWQLHLPDALMYSDLKYPGLVIHASGGMHMIDPLFQRDLVKECRKRRIPVIFDEVFTGFWRLGAESAAEILGCAPDIACYAKLLTGGIVPLAATLATESIFEAFEGKSKLFALLHGHSYSGHAIGCAAAIKAIQWFKDAEMNLNICTDGSRLQELWDSKLVAKISALSSVKRVIALGTICALELQADESNTGYGSLLASSLVQKLRDDGVYMRPLGNVIYLMCGPATPPAMCSTLLQKLHKRLDEC

SEQ ID NO: 297 - protein, 878 aa, Synthetic construct
MSSHPSPIEDADEARCVAENVADALDVSYPTYMVWGSNTGVGKTLVSAGLCSAILRLSKCQGNSGAKDLLYLKPVQTGFPSDSDARYVYQEVSRVGRLHPEAISEGLFLCNHTLQVSPAVQISARAGASVPVQPQSAWNAGGLSSSLNGTGMKDFCSYESQLLQGVKSRNIPADGDVYGRAQLRNTLSRFTCKTMWAWYEPISPHLAAAREGSTVPDTMVVEAIQRSLQALSSSRKTSGHREDAGDCAEKWAILETAGGVASPGPSGSLQCDMYRSLRFSGLLVGDGRLGGISTTIAAYESLRSRGYDIPAIVIVDSGLSNEEPVLQYLRHKIPVVVLPPLPEDPNKRLEEWFRLAEGTFLELMNVLENSHSKRLRRLEEMPKMAGEILWWPFTQHDLVAQDSITLIDSRSGENFSVYKSGTPSTGKTIATQFDACASWWTQGPDSILQPEIAREVAYTAGRYGHVMFPENVHEPALRCAEILLAGAGRGWAERVFFSDNGSTAIEVAIKMAFRKYIVDHGLSDPSTIERRGGQLKVVALKGSYHGDTLGAMEAQAPSAYTGFKQQPWHVGRGFFLEPPTVFQRQGRWHLQLPRVFHDSDSSDSASCWKSRDEIFDICRDSTPLANLYIRSINQQLAAAVREENNVPAALIIEPVMHGAGGMDMIDPLYQRMLVRECRRRGIPTIFDEVLSGCWRFGVESAVDLLGCSPDIACYSKLLSGGLVPLAATLATQAVFEAFRGISKLDALLHGHSYTAHAVGCASAVVSLQYFSDPSKNSNLLPGGRRLRELWKPELVSLISSHQSVERVVSVGTIFALELRANAAESGYASMLSKELVENLRQEGIYTRPLGNVVYLMCGPLTQPKTCTTMLEKLLALLG

SEQ ID NO: 298 - protein, 811 aa, Synthetic construct
MSSAAATVPLSTPTFAVFGANTGVGKTLVSAGLVAALLNSRSPSVSAVSYLKPLQTGYPADSDARFVFARAPALLRASSSPRATRLVASCRTLFPSPAVGPEAEPLHQSQEKVVTYGGDGAEEETKVLACRTVYAWREPVSPHLAAEREGMAAGDDEVRGCVDQWLMEEGVGEGGEVWKVLETAGGVASPSASGTLQCDLYRPFRLPAILVGDGRLGGISSTLSAYETLLLRGYDVSTVILEDRDLTNDTFLLSYLRNRVHVLALPQIPEDPSDDLTDWFSESSSVFNLLKDSLQSFHSKRVERLNGMQKKSKDLLWWPFTQHNLVPQDSVTVIDSRCGENFSAYKIKDNTMMLVPQFDACASWWTQGPDSDLQIELARDMGYAAARYGHVMFPENVHEPALRAAELLLGGVGKGWASRVYYSDNGSTAVEIALKMAFRKFSLDHGILADSEKSIRNERNIQLKVLALNGSYHGDTLGAMEAQAPSAYTSFIQQPWYSGRGLFLDPPTVCIKSETCNVSLPQSMQHYPRTSGDTCFPSLAEVFCKTRDTSSAADLYLSYIKQQLSEFSQSSNSDHLAALIIEPVIQGAGGMLMIDPLFQRVLVRECRSRKIPVIFDEVFTGFWRLGVESASELLGCLPDIACYAKLMTGGIVPLAATLATEEVFESFKSDSKLTALLHGHSYTAHAMGCMAALKAIQWYRDPSTNSNLDLDHMKLKELWDGALVKQLSSLPNVKRVVSLGTLCAIELKAEGSDAGYASLYASSLVQQLRREDDIYIRPLGNVIYLMCGPCTPRDSCSRQLHKVLRRLCDLN

SEQ ID NO: 299 - protein, 839 aa, Synthetic construct
MPPELDLSHPTLVVWGSNTGVGKTIVSAGLAASVLSPSSPNTATFLYLKPVQTGFPRDSDSRFVYRKVSDLFRHRLGGFSAQLLASNHALKASVPAAREVLGARTERPGEEGEEASTGLCCYEETRVGTGESTTGDFKLVCKTLYGWKEAISPHLAVEREGMAVEDSSLREVLGRLLNSSMGGGGDRRKENVWRVIETAGGVASPGPSGSIQCDLYRPFRLPAVLVGDGHLGGISTTLSAYESLTLRGYDVIAIILADHGLSNEIPLLSNLRHRVPVLVLPPVPEDPLNDLVDWFCESSKAFSSLQDLVQSTHSKRIQRLHDMPRKAGNILWWPFTQHKLVPEEIVTVIDSRCGENFAVHKVRNDREMIVRQFDACASWWTQGPDFALQIELARDMGYSAARYGHVMFPENVYEPALHCAELLLEGVGKGWASRTYYSDNGSTAIEIALKMAFRKFLLDNEMLMDSGNGISSERCIELRVLALNGSYHGDTLGAMEAQAPSSYTGFLQQPWYSGRGLFLDPPTIFIHKEIWNLSVPESFESDQLKPEDMRFSSSDALFCPSRDSSAIAGIYSAYISNQLLQFSKLSCSTQIGALIIEPVIQAAGGMHMIDPLFQRILVRECRNRRIPVVFDEVFTGFWRLGKESAAELLGCVPDVACFGKLMSGGIIPLAVTLTTEAVFEAFKGDSKLMALLHGHSYSAHAMGCTAAAKSIQWFRDPFTNPNVEFKEKKLKELWEMKLVLQISSLPAVQRVITLGTLCAVELKAEGSDAGYASLYASLLVQQLREDGLYVRPLGNVIYLMCGPCTSSHFCSQQLQQVYQRLHEFSQHQLRDSQSFQREG

SEQ ID NO: 300 - protein, 815 aa, Synthetic construct
MLGSASDGAASGNGRALELSIASFAIWGANTGVGKTLASAGLARAATRRGTATTFLKPVQTGYPEDSDAGFVARQTKGNETAGEHAAVASGSTEGGGEGFAAGVTRAHTEFAWRRAAGPHLTAAEEGRPVSDEEIVRATRNYLREFAESAREGNARGFAVIETAGGVASPGPSGTLQCEILRALRLPAILIGDGRLGGISTTTSAYESLHARGYDVVGVLMADDGYANHEAVAKILPSGTKVFALPPLPPQGKADAWLEKSAGVFSEAFETAMNWHEKRIQALQKLPGEALEKIWWPFTQHATVEPDTVTVIDGRYGEDFEIYDQEKGRDGAIDLRFDGAASWWTQGVSAELQQELNSAAANAAGRYGHVMFPENVHQPSMDATNALLEGPGKGWGSRVFYSDNGSTATEVGLKMAFRKYYVDAGLVSKDGHQRAKDLINDGSCHLPQLRIIALDGSYHGDTLGAMDMQSPSVFTGPMQTPWYQPRGLFLQPPSLAIRNGEWTVALPPHGLLNDGEDRLFHDGKDLESNTTWKSKADAFDIGKRLDSPLANEYRQAVDKALERAEQDAKAGHMGPVGALMMEPVLHGAGGMVLIDPLFQNILMKVCRERKIPIVLDEVFAGIWRLGTEGAWEIIGEKPDISCYAKLLTGGLMPMSATVATADVFDVFYGPGKAQGLLHGHSYTAYPIGCAVASKALSLYKDPAKNPNLIVDASSKGDTPTAYLRELWDESKLKEISNKSSVRRVFGQGCVLAVELEVEGEGGYSSNAAKEVVLRLRPHSVQARPLGNVVYLMCAPTTPKATCDRLLNVLAEELSE

SEQ ID NO: 301 - protein, 831 aa, Synthetic construct
MLSTLSHTLSHPIYTIWSANTGLGKTLVSAGIAAASVASPPSKLVYIKPIQTGYPLDSDAAFVYRKIPQILHRRNPNLTLTASNQTLNVSIPAAKVKIGDNFSDSRNGFGEFGFCEEMKVGEGVGEGSELICKTIYAWNEAISPHLASEREGALVGDEEVLVLLKKCLEIGVGSEGQGSVLSLVETAGGVASPGSSGSLQCDLYRPFRLPSILVGDGKLGGISGTISAYESLTIRGYDVVAIVLEDHGLENEVPLLSYLRNRVPVLVLPSIPKDPLDNLMEWYDESQSVFDSLKGIMLSSYEKQMYRLHEMPKKAQEIFWWPFTQHKLVPQEKVTVIDSRCGENFAVHKVKDHDYITQMFDACASWWTQGPNAALQIKLAREMGYTAARYGHVMFPENVYEPALQCAELLLQGVGKGWASRVFFSDNGSTAIEIALKMAFRKFLADNKLLMDLPHYNTDESNIELKVVALNGSYHGDTLGAMDAQAPSPYTGFLQQPWYTGRGVFLDPPFVSMCDGVWKIAVPKKMHYEDVILEDTSFNSRDQVFNRSRDDSKLASIYSTYISQELLPSSGSTKCSYAGALIIEPVIQGAGGMLMVDPLFQRILVKECKNRKIPVIFDEVFTGYWRLGVESAAELLFCQPDIACFAKLMTGGMIPLAATLATNDVFESFVGDSKLNALLHGHSYSAHAVGCATACNSIKWFKDSQTNPNLVPGQNLLRELWDAELVRKISFHPAVQRVVSLGTLFALELKVEDNDAGYASLSGTSLLLKLREDGIYMRPLGNVIYMMCGPCTSHRVCLQMLEKLYMRLDEFKQEKIGTARDYDHDHRLPIA

SEQ ID NO: 302 - protein, 844 aa, Synthetic construct
MSTTAHSQLHVPLNHPTFLVWASNTSLGKTLVSTGLAASSLLNPTPKPRKFLYLKPIQTGFPSESDSSSVFHKLSRLSLLRRHNLPHFSLFSSNHILKASFPAANSALGQEISETPHSGMRDLGYYEEAKPEGDVGGGAASQLVCKTLYAWREAVSPHLAAERESGVVEDAAVLELLQKCLRFELEGGGEKGKETEIFCVVETAGGVASPGPSGSLQCDLYRPFRLPGILVGDGRLGGISGTISAYESLKLRGYDIAAVVFEDHGLVNEMPLLSYLRNRVPVLVLPSVPKDLSNDLMEWFDESRGVFDSLKEEMLSAYSKRMMRLQDMPKKAGEIFWWPFTQHQLVPEEAVTVIDSRHGENFAVFKAQNNEFITQQFDACASWWTQGPDTTLQTELARDMGYAAARFGHVMFPENVYEPALECAELLLEGVGKGWASRTFFSDNGSTAIEIALKMAFRKFSYDHGILSDGRKDNTASQRVKLMVLALQGSYHGDTLGAMEAQAPSSYTGFLQQPWYTGRGLFLDPPTVYMCNGVWKLSLPEGLHLEIPKLENKGFSSRDEIFHKIRDKSDLARIYSSYISEQLSQYSGSGGFYHIGALIMEPVILGAGGMHMIDPLFQRVLVNECRSKKIPVIFDEVFTGFWRLGRETAAELLGCVPDIACFAKLMTGGIIPLAATLATNAIFNSFIGESKLKALLHGHSYSGHAMGCTAAVKSIKWFKDPQTNLNITDEGRSLRELWDEDVVQQISSHPAVERVVALGTLFALELRAEGSNAGYASQYASSLLQNLRQDGIYTRPLGNVIYLMCGPCTSPEICSQLLVKLYKRLEDFDQFHQIREENSESYGG

SEQ ID NO: 303 - protein, 734 aa, Synthetic construct
MSLDQSVPNAVPTSLHAPIVQVFGSNTDVGKTVIAAGLCRAALLSSKNATVGYIKPLQTGGDAMMDAEFLNRHAGNADNRLTSHTLFSWETAVSPHLAASLENKAVDDATVVAKLSKTLKQIQKEEKGSALTVVETAGGVCSPSASGKFQCDVYRPLRLPTVLVGDGCLGGISATMSALDSLLIRGYDVSCIVLIEQDNLSNGEAISERASELGIPIFSLDKLPPQPEPLDLWYENSTETFRSVHDTIASTHKARVARLQELPSIAKKALWWPFTQHKSNKGVLVIDSAYGDTFATYNQKNQAIEPMYDACASWWTQGVGHGNAKMALSLATAAGRYGHVMFPENAHEPAIALSEMLLKSVGKNWAGKVFFSDDGSTAVEIGIKMALRKYAVDHGLGMSFEGINDVLVLAQEGCYHGDTLGTMNIAEPSVYNKTQHPWYKPKALFVHPPSVKVASNGQMQVTWQNVNPTLVTHLPTLDDLFDISRDTSPLTQQYTEYVESLLDSVPSTTVVGALIVEPILIGAGGMVFVDPLFQRTMVRVCQQRKIPVIFDEVFSGFWRLGAESARDLLQVNPDIACYAKLLTGGAVPMSTTLATNEVFDAFYTDSKADALLHGHSFTANPVGCAAAVTALDMYKTIEKKNSTRVHWNVDQVAALAARPGIARAFQLGTVLVIELESTSRGYTDTTGQDVLVRLRNHGIYARSLGNVLYIMASPLSTPATCIKIFNTVVDNLFA

SEQ ID NO: 304 - protein, 733 aa, Synthetic construct
MCNAASKKGDRTWFLKPVSTGAVDEADGCHIQRFASSTNHETLFQYDIPCSPHIAAKVSGKPIPSDEAVLAKIHDSVSRYASEGPGWLFLETAGGVHSPGPSGTPQADLYTPLRAPVILVGDSKLGGISQTISAYESLRMRGHDIESILLFQDMKYENYQYLKDYFSKQGGIPVDTVPEPPSRLPDIQQDTEQMREYYASQTSNVSHVLDHLDKRGKQRISRLESLSEKASKSIWYPFTQQKLVTADTISAIDSAHGDYFQVLNKTYENLLQPAFDGSASWWSQGLGHANSRLTLAAAYAAGRYGHVMFAEAIHEPALALAEMMLEGAQNSRFSRVFYSDNGSTGCEVAVKMALRAARLRYGWGPNDNLQILGLKGSYHGDTIGAMDCAEPCVYNEKIEWYEGKGYWFDYPTIQCVEGKWVVSAPNGMGQDQKLESISEVFNLESRLKTEQYRGYEEYIEKTLKKLQDQGRKFGALMMEPIILGAGGMIFVDPLFQRALVDVVRRSPHLFGTKDALPAQGPQWSGLPVIFDEVFTGLYRLGRFTAASFLGTEADISVNAKLLTGGLVPLCTTMASESIFDAFKSDDKSDALLHGHSYTAHAVGCQVAVESVSEMQSMEKNGEWEWAEKDWAEDETQAWSVWSRDFVTDMSHNPQVLGVWALGSVLAISLRDDDGVGYKSLAAKKIQSHLRQGTGSWNAHSRVLGNVFYVMASQKTSRQSIRELQGLLVDALSK

SEQ ID NO: 305 - protein, 813 aa, Synthetic construct
MSSSFSSALPLSSPTFAVFGANTGVGKTLVSAGLAASLLRSHAASPSAVLYLKPLQTGFPDDSDAGFLYRRVPALLRPSHAAHLAASIDTLSPAPSVETQSPSREEAAFSYDGEGEAVRKLLACRTLYAWREAVSPHLAAEREGMAVEDAHVRSLLAACLVEGENLGKGEGDVWKLVETAGGVASPGPSGTLQCDLYRQFRLPTILVGDGRLGGISCTLSAYETLLLRGYDVSAVILEDHGLSNNKFLLSYLRNRVPVLVLPPIPEDPSDDLTDWFSESSSVFGLLEDALRSFHLTRIQRLNSMQRKSKDLLWWPFTQHNLVPVDCVTVIDSRCGESFSAYKVKDNKMMMIPQFDACASWWTQGPDSKLQIELARDMGYAAARYGHVMFPENAHEPALRCAELLLGGIGKDWASRVYYSDNGSTAIEIALKMAFRKFSLDRGILLDSDKSIITNGRNIQLKVLALKGSYHGDTLGAMEAQAPSAYTSFLQQPWYSGRGLFLDPPTVFIKNGTCTLSLPQAIQNCHLSPGDKCFPSLAEVFCKTRDSSSAADLYSTYISQQLSEYSLSSNTEHIAALIIEPVIQGAGGMHMIDPLFQRVLVHECRDRKIPVIFDEVFTGFWRLGVESASELLGCLPDVACYAKLMTGGLVPLAATVTTEAVFEAFKSDSKLTALLHGHSYTAHAMGCSAAVKAIQWFRDPSTNSNLDFDCMKLKELWDGTLVNQLSSLPNVKRIVSLGTLCAIELQAEGSDAGYASLYARSLIQQLREEDDIYVRPLGNVIYLMCGPCTTRDVCTEQLSKVYRRISHFNPVHRG

SEQ ID NO: 306 - protein, 815 aa, Synthetic construct
MSTAVPSHFNLPLNHPTYLIWSANTSLGKTLVSTGIASSFLLHQPSSSPPAAHSAKLLYLKPIQTGFPSDSDSRFVFSKLDSLSLRRRIPLSVSNSVLRSSLPVAESMRRNIKVSESGMCDLNFREEKTVTGAPELLCKTLYAWEAAISPHLAAEREHATVEDSVVLKMVEQEMECGSKANVLCLVETAGGVASPGPSGTLQCDLYRPFRLPGILVGDGRLGGISGTIAAYESLKLRGYDVAAVVFEDHGLVNEVPLTSYLRNKVPVLVLPPVPKDPSDDLIEWFVESDGVFKALKEVMVSVYLERVERLNGMAKQAGEVFWWPFTQHKLVPEDNVTIIDSRCGENFSVFKASDNNSITQQFDACASWWTQGPDPAFQAELAREMGYTAARFGHVMFPENVYEPALKCAELLLDGVGKGWASRVYFSDNGSTAIEIGLKMAFRKFCVDHETLFGLSEDAEEKKHVDVKVLALRGSYHGDTLGAMEAQAPSPYTGFLQQPWYTGRGLFLEPPTVFLSNGTWNLSLPESFSQTASEECGTFTTRDEIFDKSRDTSVLATVYSTYVSEQLQEYSGISQSAHVGALIIEPVIHGAGGMHMVDPLFQRVLVNECRNRKIPVIFDEVFTGFWRLGVETTADLLGCKPDIACFAKLLTGGMIPLAVTLATDAVFDSFSGDSKLKALLHGHSYSAHAMGCATATKAIEWFKDPETNHNIDSQRGTLRELWDEELVQHISCHCAVERVVVLGTLFALELKVDASNSGYASLYAKSLLEMLREDGIFMRPLGNVVYLMCGPCTSPEICRRLLTKLHKRLGEFNRA

SEQ ID NO: 307 - protein, 830 aa, Synthetic construct
MSTLTIPLSHPTYIIWSSNTSLGKTLVSTGLSSSFLLSPSSSSKKFLYLKPLQTGFPSDSDSRFLFQKLSSLSLSRNLPLFSSHSVLLSSLPAAKSFKPNEFSLNESREMCELGFYEEKKVLEAGRVAPELVSETIYAWEGALSPHFAAEREGGAVEDSELVKRLETRLKEGLLEGGVERGKLDGFCVVETAGGVASPGPSGTLQCDLYRPLRFPGVLVGDGRLGGISGTISAYESLKLRGYDVVAIVIEDHGLINEIPLKSYLRSRVPVFVLPPIPQDPSNDLMEWFDESCNVFNSLKDIMLEAYLERMRRLNEMPRKAGDVFWWPFTQHKLVPPSTVTVIDSRCGENFSVYKVQNKEYITQQFDACASWWTQGPDATLQTELARDMGYAAARFGHVMFPENVYEPALECAELLLDGVGKGWATRVYFSDNGSTAIEIALKMAFRKFSSDHGILPELLKNNPTESCTELMVLALKGSYHGDTLGAMEAQAPSSFTGFLQQPWYTGRGLFLDPPTVFMHNGKWTVSLPEVFHSATLKPEDTTFRSRDEIFLKSRDESNLAGLYSLYVSQQLSQYSTLSETNKQIGALIMEPIIQGAGGMHMVDPLFQRMLVNECRHCRIPVIFDEVFTGFWRLGVESAAELLGCVPDIACFAKLMTGGIIPLAATMATDAIFDSFTGDSKLKALLHGHSYSAHAMGCTAAAKSIKWFKDPNTNLNITSEKSQKMLLRELWDAELVQQFSSHPSISRVVTLGTLFALELQADESDAGYASLYARSLVQMLREDCIYTRPLGNVIYVMCGPCTSPKMCTLQLLKLYTKLEEFTLVKTKMNII

SEQ ID NO: 308 - protein, 811 aa, Synthetic construct
MSTSSSSSAAAAAVPLTSPAFAVFGANTGVGKTLVSAGLVASLLASPSPSPSTVAYLKPLQTGFPDDSDARFVFDRAPALLRRLRLAGGGASTRLVASNHTLFPSPAVDPLPERQDTVVNYGGEEGVEEKALVCRTVYAWREPVSPHLAAEREGMPVEDEEVRWLVDRWLAEEDGGGEVWKVLETAGGVASPGPSGTLQCDLYRSSRLPAVLVGDGRLGGISSTLSAYETLLLRGYDVGSVILEDRGLSNDRFLLSYLRKRVPVHVLPPIPEDPKDDLTDWFSESSSAFSSLKDSLQSFHSRRVQRLNSMQRKSKYLLWWPFTQHDLVPVDSVTVIDSRFGENFSAYKVKDKTIVPQFDACASWWTQGPDSNLQIELARDMGYAAARYGHVMFPENVHEPALRCAELLLGGVGKDWASRVYFSDNGSTAIEIALKMAFRKYACDHGIIVDSEKDIRSEGSVHFKVLALNGSYHGDTLGAMEAQAPSAYTSFLQQPWYSGRGLFLDPPTVYIKNKSANLSLPPSIMHDQLSSCDTCFSSLTEVFCKTRDTSSAANVYVSYISQQLSQYAMSNNSEHIAALIIEPVIQGAGGMHLIDPLFQRLLVKECKNRKIPVIFDEVFTGFWRLGVESASELLGCFPDISCYAKLMTGGIVPLAATLATEPIFEAFRSDSKLTALLHGHSYTAHPMGCTAAVKAIQWYKDPSTNSNIDLDRMKLKELWDSALVNHLSSLPNVKRVVSLGTLCAIELKAEGSDAGYASLYASSLIRQLREEDNIYARPLGNVIYLMCGPCTTQDSCTRQLAKVHRRLQKLN

SEQ ID NO: 309 - protein, 804 aa, Synthetic construct
MSSSTTSHPPSLPLSHPIYLIWGSNTGVGKTLVSAGIAAAFLLSSPTPSQFHYLKPLQTGFPSDSDSRFVFNKLRQLSLIRNPHIPLSASHRVINVSPAVTASNPLAGEEGVGPPPELLCKTLYAWEEAVSPHLAAEREGLVVKDSAVLETLGECLEDVAECGAGKERSEVLCVVETAGGVASPGPSGSLQCDLYRPFRIPAVLVGDGRLGGISGTISAYESLKLRGYDVVAVVFEDHGLLNEGPLMSYMRNKVPVLVLPPIPKDPLNDLMEWFESSHYIFSNLKEIMLSAYFERIKKLHDMPREARDIIWWPFTQHKLVPDGGVTVIDSRCGENFSIFKVQKTEVIAPQFDACASWWTQGPDAIMQTELAREMGYAAARFGHVMFPENVHEPALNCAELLLQGVGKGWASRTYFSDNGSTAIEIALKMAFRKFSVDHGLIVHCHEDTTNERSTELMVLALQRSYHGDTLGAMEAQAPSSYTGFLQQPWYTGRGLFLDPPSVFMHNSTWNVSIPEGYHLESLKGKSITFASPDEIFHKGRDKSELATVYSSYISKVLSGFRGSNNVGALIMEPVIQGAGGMHMVDPLFQRVLVNECRSRKIPVIFDEVFTGFWRLGVETAVELIHCVPDIACFGKLLTGGIIPLAVTLATNAVFDSFIGDSKLKALLHGHSYSAHAMGCAAAVKSIQWFKDPCSNPNITSEGRLLRELWDDKMVHRISSHPAIQRVVALGTLCALELKAEGNNAGYGSLYARPLLEKLREDGVYMRPLGNVIYLLCGPCTSPEVCNQLLVKLLRRLEEFDVGKN

SEQ ID NO: 310 - protein, 801 aa, Synthetic construct
MLSSPTFAVFGANTGVGKTLVSAGLAASLLRSHAASPSAVLYLKPLQTGFPADSDAGFLYRRVPALVRPSHAAHLVASIDTLSPAPSVETPSPSREEAAFSYDGEGKAVRKLLACRTLYAWREAVSPHLAAEREGMTVEDAHVRSLLAACLAEGETLGKGEGDVWKLVETAGGVASPGPSGTLQCDLYRHFRLPIILVGDGRLGGISGTLSAYETLLLRGYDVSAVILEDCGLSNDKFLLSYLRNRVPVLVLPPIPEDPSDDLTDWFSESSSVFGLLEDALRSFHLKRIQRLNSMQRKSKDLLWWPFTQHNLVPVDCVTVIDSRCGESFSAYKVKDNKLMMIPQFDACASWWTQGPDSKLQIELARDMGYAAARYGHVMFPENAHEPALRCAELLLGGIGKDWASRVYYSDNGSTAIEIALKMAFRKFSLDRGILLDSDKSITNERNIQLKVLALKGSYHGDTLGAMEAQAPSAYTSFLQQPWYSGRGLFLDPPTVFIRNGTCALSLPQSIQNCHLSPGDKCFPSFAEVFCKSRDSSAAADLYSTYISQQLSEYSMSSNTEHIAALIIEPVIQGAGGMHMIDPLFQRVLVHECRDRKIPVIFDEVFTGFWRLGVESASELLGCLPDVACYAKLMTGGIVPLAATVTTEAVFEAFKSDSKLTALLHGHSYTAHAMGCSAAVKAIQWFRDPSTNSNLDFDCMKLKELWDGTLVNQLSSLPNVKRVVSLGTLCAIELQAEGSDAGYASLYARSLIQQLREEDDIYVRPLGNVIYLMCGPCTTRDVCTEQLSKVYRRISHFNPIH

SEQ ID NO: 311 - DNA, 7742 bp, Synthetic construct
  source 1..7742: mol_type = other DNA; note = pET-24 His-AtBIO3-BIO1 E. coli expression vector
ggcagcagccatcatcatcatcatcacagcagcggcctggtgccgcgcggcagccatatgaagtccaccagcgtgtccccgtttcacttacctctgaatcaccctacgtacctgatttggagtgctaacacaagcctcggtaagactctcgtctctaccggcatcgcggcaagcttccttttgcagcagccgtcaagtagtgcgactaaactgctctacctcaagccaattcagactggcttcccttcagactcagactcccgcttcgtgttttcaaagttagactcattatccctgcgtcgccaaatcccaatttctatctcaaacagcgtgttgcattcatcactgccagccgctaaatcccttgggctgaacgtagaagttagtgagtctggcatgtgctcccttaactttcgcgacgaaaagacagttacgggcgcgcctgagctgctgtgtaagacgctttacgcatgggaagcagcgatctccccgcatttagcggccgagcgcgaaaatgctacagtcgaggactctgttgtcctgcaaatgatcgagaagtgcctcaaagaggagatggagtgtggagttaagagcgagaagagtgatctgttgtgtcttgtagaaactgctggcggcgtggcgagccctggcccgtccggtacgttacaatgtgacttataccgtccctttcgtctcccaggaatcttggtcggggacggccgtctgggcggtatcagcggaacaattgcggcatacgaatcgctgaagcttcgtggttacgatatcgcggcagtcgtgtttgaagatcacggcctcgtgaacgaggtgccactgacttcatacttacgtaacaaggtcccagtgttagtcttaccgcctgtcccaaaggacccgtcggacgatctcatcgagtggtttgtcgagtcagacggtgtatttaaggcgctgaaggagacgatggtattagctaacttagagcgtctggagcgtcttaacggtatggcgaagctggcgggtgaggtgttttggtggccgtttacacaacataagttagtccatcaagagaccgtaaccgtaattgacagtcgttgcggcgagaacttttcgatctataaggccagcgataatagttccttatctcaacagtttgatgcgtgtgcatcgtggtggacacaggggcccgaccctacttttcaagcggaactggcacgtgaaatgggctatacagctgctcgttttggtcatgtcatgtttcccgaaaatgtatacgagccagcgttaaagtgcgccgagttgctcttggacggagtagggaagggttgggcatcgcgcgtatacttttctgacaatggcagtacggctatcgaaatcgccttaaagatggcattccgtaagttctgtgtcgatcacaacttttgcgaggcaacggaagaggaaaagcacattgtcgtgaaggtgatcgcccttcgcgggtcctaccatggggataccttgggcgcgatggaagcgcaggctccgagtccttataccggtttccttcaacaaccttggtatactggccgtgggttattcttggacccgccgacggtgtttctctctaatggtagttggaatatttccttaccagagtcgtttagcgagattgcacctgaatacgggacgttcactagtcgtgacgaaatctttgacaagagccgtgacgcgagcacgttagcccgcatctacagcgcgtatctgagcaagcacttgcaggaacacagtggtgtgcgccaaagtgcgcacgtcggtgccttgattatcgagcccgtcatccacggggcgggcggaatgcacatggtggacccgttattccagcgtgtcctcgtgaatgaatgccgtaatcgtaagatcccggtcatctttgacgaggtatttacagggttttggcgtcttggggttgagacgacgaccgagttgcttggctgtaagccggatattgcgtgttttgccaaactcttaactggtggaatggtacctttagcagttacgctggcgacagacgcagtgttcgactctttctccggcgatagcaagttaaaggcactccttcacggacatagctacagcgcgcacgcaatgggctgcgccaccgccgccaaggccatccaatggttcaaggacccggagactaatcataacattacctcgcagggtaaaactttacgcgagttatgggacgaggaactcgttcagcaaattagtagccacagtgcggtccaacgcgttgtggttatcggaacgttatttgcgctcgagcttaaggcagacgcgtctaacagtggctacgcctctctttatgcgaaaagcctgctgattatgttgcgcgaggacggtatctttacccgccccttaggtaatgtcatctaccttatgtgcggaccttgtaccagcccagagatctgccgccgcctcttgaccaagctttataagcgtctgggtgagtttaaccgcacctaagcggccgcactcgagcaccaccaccaccaccactgagatccggctgctaacaaagcccgaaaggaagctgagttggctgctgccaccgctgagcaataactagcataaccccttggggcctctaaacgggtcttgaggggttttttgctgaaaggaggaactatatccggattggcgaatgggacgcgccctgtagcggcgcattaagcgcggcgggtgtggtggttacgcgcagcgtgaccgctacacttgccagcgccctagcgcccgctcctttcgctttcttcccttcctttctcgccacgttcgccggctttccccgtcaagctctaaatcgggggctccctttagggttccgatttagtgctttacggcacctcgaccccaaaaaacttgattagggtgatggttcacgtagtgggccatcgccctgatagacggtttttcgccctttgacgttggagtccacgttctttaatagtggactcttgttccaaactggaacaacactcaaccctatctcggtctattcttttgatttataagggattttgccgatttcggcctattggttaaaaaatgagctgatttaacaaaaatttaacgcgaattttaacaaaatattaacgtttacaatttcaggtggcacttttcggggaaatgtgcgcggaacccctatttgtttatttttctaaatacattcaaatatgtatccgctcatgaattaattcttagaaaaactcatcgagcatcaaatgaaactgcaatttattcatatcaggattatcaataccatatttttgaaaaagccgtttctgtaatgaaggagaaaactcaccgaggcagttccataggatggcaagatcctggtatcggtctgcgattccgactcgtccaacatcaatacaacctattaatttcccctcgtcaaaaataaggttatcaagtgagaaatcaccatgagtgacgactgaatccggtgagaatggcaaaagtttatgcatttctttccagacttgttcaacaggccagccattacgctcgtcatcaaaatcactcgcatcaaccaaaccgttattcattcgtgattgcgcctgagcgagacgaaatacgcgatcgctgttaaaaggacaattacaaacaggaatcgaatgcaaccggcgcaggaacactgccagcgcatcaacaatattttcacctgaatcaggatattcttctaatacctggaatgctgttttcccggggatcgcagtggtgagtaaccatgcatcatcaggagtacggataaaatgcttgatggtcggaagaggcataaattccgtcagccagtttagtctgaccatctcatctgtaacatcattggcaacgctacctttgccatgtttcagaaacaactctggcgcatcgggcttcccatacaatcgatagattgtcgcacctgattgcccgacattatcgcgagcccatttatacccatataaatcagcatccatgttggaatttaatcgcggcctagagcaagacgtttcccgttgaatatggctcataacaccccttgtattactgtttatgtaagcagacagttttattgttcatgaccaaaatcccttaacgtgagttttcgttccactgagcgtcagaccccgtagaaaagatcaaaggatcttcttgagatcctttttttctgcgcgtaatctgctgcttgcaaacaaaaaaaccaccgctaccagcggtggtttgtttgccggatcaagagctaccaactctttttccgaaggtaactggcttcagcagagcgcagataccaaatactgtccttctagtgtagccgtagttaggccaccacttcaagaactctgtagcaccgcctacatacctcgctctgctaatcctgttaccagtggctgctgccagtggcgataagtcgtgtcttaccgggttggactcaagacgatagttaccggataaggcgcagcggtcgggctgaacggggggttcgtgcacacagcccagcttggagcgaacgacctacaccgaactgagatacctacagcgtgagctatgagaaagcgccacgcttcccgaagggagaaaggcggacaggtatccggtaagcggcagggtcggaacaggagagcgcacgagggagcttccagggggaaacgcctggtatctttatagtcctgtcgggtttcgccacctctgacttgagcgtcgatttttgtgatgctcgtcaggggggcggagcctatggaaaaacgccagcaacgcggcctttttacggttcctggccttttgctggccttttgctcacatgttctttcctgcgttatcccctgattctgtggataaccgtattaccgcctttgagtgagctgataccgctcgccgcagccgaacgaccgagcgcagcgagtcagtgagcgaggaagcggaagagcgcctgatgcggtattttctccttacgcatctgtgcggtatttcacaccgcatatatggtgcactctcagtacaatctgctctgatgccgcatagttaagccagtatacactccgctatcgctacgtgactgggtcatggctgcgccccgacacccgccaacacccgctgacgcgccctgacgggcttgtctgctcccggcatccgcttacagacaagctgtgaccgtctccgggagctgcatgtgtcagaggttttcaccgtcatcaccgaaacgcgcgaggcagctgcggtaaagctcatcagcgtggtcgtgaagcgattcacagatgtctgcctgttcatccgcgtccagctcgttgagtttctccagaagcgttaatgtctggcttctgataaagcgggccatgttaagggcggttttttcctgtttggtcactgatgcctccgtgtaagggggatttctgttcatgggggtaatgataccgatgaaacgagagaggatgctcacgatacgggttactgatgatgaacatgcccggttactggaacgttgtgagggtaaacaactggcggtatggatgcggcgggaccagagaaaaatcactcagggtcaatgccagcgcttcgttaatacagatgtaggtgttccacagggtagccagcagcatcctgcgatgcagatccggaacataatggtgcagggcgctgacttccgcgtttccagactttacgaaacacggaaaccgaagaccattcatgttgttgctcaggtcgcagacgttttgcagcagcagtcgcttcacgttcgctcgcgtatcggtgattcattctgctaaccagtaaggcaaccccgccagcctagccgggtcctcaacgacaggagcacgatcatgcgcacccgtggggccgccatgccggcgataatggcctgcttctcgccgaaacgtttggtggcgggaccagtgacgaaggcttgagcgagggcgtgcaagattccgaataccgcaagcgacaggccgatcatcgtcgcgctccagcgaaagcggtcctcgccgaaaatgacccagagcgctgccggcacctgtcctacgagttgcatgataaagaagacagtcataagtgcggcgacgatagtcatgccccgcgcccaccggaaggagctgactgggttgaaggctctcaagggcatcggtcgagatcccggtgcctaatgagtgagctaacttacattaattgcgttgcgctcactgcccgctttccagtcgggaaacctgtcgtgccagctgcattaatgaatcggccaacgcgcggggagaggcggtttgcgtattgggcgccagggtggtttttcttttcaccagtgagacgggcaacagctgattgcccttcaccgcctggccctgagagagttgcagcaagcggtccacgctggtttgccccagcaggcgaaaatcctgtttgatggtggttaacggcgggatataacatgagctgtcttcggtatcgtcgtatcccactaccgagatatccgcaccaacgcgcagcccggactcggtaatggcgcgcattgcgcccagcgccatctgatcgttggcaaccagcatcgcagtgggaacgatgccctcattcagcatttgcatggtttgttgaaaaccggacatggcactccagtcgccttcccgttccgctatcggctgaatttgattgcgagtgagatatttatgccagccagccagacgcagacgcgccgagacagaacttaatgggcccgctaacagcgcgatttgctggtgacccaatgcgaccagatgctccacgcccagtcgcgtaccgtcttcatgggagaaaataatactgttgatgggtgtctggtcagagacatcaagaaataacgccggaacattagtgcaggcagcttccacagcaatggcatcctggtcatccagcggatagttaatgatcagcccactgacgcgttgcgcgagaagattgtgcaccgccgctttacaggcttcgacgccgcttcgttctaccatcgacaccaccacgctggcacccagttgatcggcgcgagatttaatcgccgcgacaatttgcgacggcgcgtgcagggccagactggaggtggcaacgccaatcagcaacgactgtttgcccgccagttgttgtgccacgcggttgggaatgtaattcagctccgccatcgccgcttccactttttcccgcgttttcgcagaaacgtggctggcctggttcaccacgcgggaaacggtctgataagagacaccggcatactctgcgacatcgtataacgttactggtttcacattcaccaccctgaattgactctcttccgggcgctatcatgccataccgcgaaaggttttgcgccattcgatggtgtccgggatctcgacgctctcccttatgcgactcctgcattaggaagcagcccagtagtaggttgaggccgttgagcaccgccgccgcaaggaatggtgcatgcaaggagatggcgcccaacagtcccccggccacggggcctgccaccatacccacgccgaaacaagcgctcatgagcccgaagtggcgagcccgatcttccccatcggtgatgtcggcgatataggcgccagcaaccgcacctgtggcgccggtgatgccggccacgatgcgtccggcgtagaggatcgagatctcgatcccgcgaaattaatacgactcactataggggaattgtgagcggataacaattcccctctagaaataattttgtttaactttaagaaggagatatacatatg

SEQ ID NO: 312 - DNA, 17284 bp, synthetic construct
  source 1..17284: mol_type = other DNA; note = CPF1 SOY EXPRESSION VECTOR
aaccctgtggttggcatgcacatacaaatggacgaacggataaaccttttcacgcccttttaaatatccgattattctaataaacgctcttttctcttaggtttacccgccaatatatcctgtcaaacactgatagtttaaactggcactagcctaacggtgttgactaactaggccgcttccctaattagctaaggtaccggcgcgccaccggtgagctcgggacccgaattcattatgtggtctaggtaggttctatatataagaaaacttgaaatgttctaaaaaaaaattcaagcccatgcatgattgaagcaaacggtatagcaacggtgttaacctgatctagtgatctcttgcaatccttaacggccacctaccgcaggtagcaaacggcgtccccctcctcgatatctccgcggcgacctctggctttttccgcggaattgcgcggtggggacggattccacgagaccgcgacgcaaccgcctctcgccgctgggccccacaccgctcggtgccgtagcctcacgggactctttctccctcctcccccgttataaattggcttcatcccctccttgcctcatccatccaaatcccagtccccaatcccatcccttcgtaggagaaattcatcgaagctaagcgaatcctcgcgatcctctcaaggtactgcgagttttcgatccccctctcgacccctcgtatgtttgtgtttgtcgtagcgtttgattaggtatgctttccctgtttgtgttcgtcgtagcgtttgattaggtatgctttccctgttcgtgttcatcgtagtgtttgattaggtcgtgtgaggcgatggcctgctcgcgtccttcgatctgtagtcgatttgcgggtcgtggtgtagatctgcgggctgtgatgaagttatttggtgtgatctgctcgcctgattctgcgggttggctcgagtagatatgatggttggaccggttggttcgtttaccgcgctagggttgggctgggatgatgttgcatgcgccgttgcgcgtgatcccgcagcaggacttgcgtttgattgccagatctcgttacgattatgtgatttggtttggactttttagatctgtagcttctgcttatgtgccagatgcgcctactgctcatatgcctgatgataatcataaatggctgtggaactaactagttgattgcggagtcatgtatcagctacaggtgtagggactagctacaggtgtagggacttgcgtctaattgtttggtcctttactcatgttgcaattatgcaatttagtttagattgtttgttccactcatctaggctgtaaaagggacactgcttagattgctgtttaatctttttagtagattatattatattggtaacttattacccctattacatgccatacgtgacttctgctcatgcctgatgataatcatagatcactgtggaattaattagttgattgttgaatcatgtttcatgtacataccacggcacaattgcttagttccttaacaaatgcaaattttactgatccatgtatgatttgcgtggttctctaatgtgaaatactatagctacttgttagtaagaatcaggttcgtatgcttaatgctgtatgtgccttctgctcatgcctgatgataatcatatatcactggaattaattagttgatcgtttaatcatatatcaagtacataccatgccacaatttttagtcacttaacccatgcagattgaactggtccctgcatgttttgctaaattgttctattctgattagaccatatatcatgtatttttttttggtaatggttctcttattttaaatgctatatagttctggtacttgttagaaagatctgcttcatagtttagttgcctatccctcgaattaggatgctgagcagctgatcctatagctttgtttcatgtatcaattcttttgtgttcaacagtcagtttttgttagattcattgtaacttatggtcgcttactcttctggtcctcaatgcttgcagggatcccctaaatagaccatggctcctaagaagaagcggaaggttggtattcacggggtgcctgcggcttcaaagctcgagaaattcaccaactgttattcgttgagcaaaacactgcggtttaaagcgattccagtcggcaagactcaagagaatatagacaataagcggctgttggtggaagatgaaaagcgcgcggaagactacaaaggggtgaagaagttgttggacagatactacctctcttttatcaatgatgtcttgcactcaatcaaattgaagaatctgaacaactacatctccctcttcagaaagaaaacaaggacagaaaaggagaataaggaacttgaaaatttggagatcaatctgaggaaagagatcgcgaaagcctttaaaggcaacgaaggatacaaaagtctgttcaagaaggatataattgagacaattttgccagagttcctcgatgacaaggacgagattgcgctggtcaattcgttcaacggattcacaacagcattcacaggcttctttgataatcgggaaaatatgttctctgaggaggcaaagtccacttctattgcgttcaggtgtatcaatgagaatctcactaggtacatttccaacatggatatctttgagaaggttgacgcaatttttgacaagcacgaagttcaggagattaaggagaagatcctcaattccgattatgacgttgaggacttcttcgagggtgagttttttaatttcgtgctcactcaagagggtatcgacgtgtataatgcgatcatcggtgggttcgtgactgagtccggtgaaaagattaagggattgaacgagtatatcaacctttacaaccaaaagacgaaacagaagctgccaaagttcaagcctctttacaaacaggttctttcagaccgcgagtcactctcgttctatggggagggctacacttcggatgaggaagtcctggaggtgttcaggaatactctcaataagaattcggagattttctcttctataaaaaaactggaaaagttgtttaagaattttgacgaatactctagcgccggcatatttgtgaaaaacggcccggccatatcaacgataagtaaagatatcttcggcgaatggaacgtgatcagagacaaatggaacgcggagtatgacgatattcacctgaagaagaaggctgtcgtaacggagaagtacgaggatgatcgcaggaaaagcttcaaaaagatcggaagtttcagcctggaacagttgcaggagtatgctgacgccgatcttagcgtcgtcgagaagttgaaggagataatcatccaaaaggtcgacgagatatataaagtctatggatcaagtgaaaaactgttcgacgccgacttcgttttggagaagtccctgaagaagaacgacgctgttgttgccattatgaaggatctgctcgacagcgtgaagagtttcgagaactatattaaggcttttttcggggaggggaaggagactaacagagatgagtccttctacggagacttcgtcctcgcgtacgatatactccttaaggtagaccacatctacgacgcaatcagaaattacgtgacacaaaagccgtacagcaaggacaagttcaaactctacttccagaacccccagttcatgggcggctgggacaaggacaaggaaacggattacagggctacgatcctgaggtatggttcaaaatactacttggcgattatggacaagaagtacgccaagtgtctccagaagattgacaaagacgatgtcaatggcaattatgagaagatcaactacaagctgcttccgggtccgaacaagatgctcccaaaggttttcttcagcaagaaatggatggcctactataacccaagcgaggacatccagaagatttataagaacggtacgttcaagaagggcgacatgttcaatcttaacgactgtcacaagctgatcgacttcttcaaagactcaattagccggtacccaaagtggtctaacgcctatgacttcaacttttcggaaaccgagaagtacaaggatatagccggattttatagagaggtggaagagcagggctacaaggtgtcattcgagtccgccagcaagaaggaagtggacaagctcgtggaagagggtaagctctacatgttccagatttataataaagactttagcgataagagccacgggacacctaatctccacacaatgtatttcaagctgctcttcgacgagaataaccacggccaaatcaggttgtcaggaggggctgaactcttcatgcggcgcgctagccttaagaaggaggagcttgtagtccaccctgcgaatagtccaattgcgaataagaacccggacaatcctaaaaagactacaacattgagctacgacgtgtacaaggataagaggttttccgaggatcagtacgagctccacatcccgattgcgatcaacaagtgcccaaagaatattttcaagataaacacagaggtgcgtgtactcctgaagcatgacgacaatccttacgtcattgggattgatcggggcgagaggaacctcctctatattgtggtggtggacgggaaggggaacatagtcgaacagtactcccttaacgaaataattaacaatttcaacggcatccgtatcaagaccgactaccattcgttgctggacaagaaggagaaggagagatttgaggcgcggcaaaattggacaagtatcgagaacatcaaggaactcaaagcaggttatatctctcaagttgtgcataagatatgcgagctggttgagaagtatgacgcagtgatcgctcttgaggacctcaactcgggctttaagaattctagagttaaagtggagaagcaggtctatcaaaagttcgagaagatgcttatagataagctcaactacatggtcgataagaaatcgaacccatgtgccaccggcggcgcactcaaaggttaccaaataacaaacaaattcgagtccttcaaatcgatgagtactcagaatgggttcatattttatataccggcgtggcttacgtctaagatcgacccgtcaactggttttgtcaacctgttgaagacgaaatacacgtccattgccgattcaaaaaagttcatatctagttttgatcgtattatgtacgtcccagaggaagatcttttcgagtttgctctcgactacaaaaacttttcgcgcaccgatgcggattacattaaaaaatggaaactctattcgtacggcaacagaatcaggatttttcgcaaccctaagaagaataacgtctttgattgggaggaagtttgcttgactagcgcgtacaaggagctctttaataagtatggcattaactaccaacagggtgatatcagagcactgctttgcgaacaatctgacaaggctttctactcatccttcatggctttgatgagcctgatgctccagatgagaaattcaattacaggcagaaccgacgtggatttcttgatctccccggttaaaaattctgatggcatcttttacgatagcaggaactatgaagcgcaagagaatgcgattctgccaaaaaatgcagacgccaacggtgcctataacatcgccaggaaagtcctgtgggcgatcggccagttcaaaaaggccgaagacgaaaaattggacaaggtcaaaatcgctatcagcaacaaagagtggctggagtatgctcagacatccgtaaagcataagcgtcctgctgccaccaaaaaggccggacaggctaagaaaaagaagtgattaattaagatcgttcaaacatttggcaataaagtttcttaagattgaatcctgttgccggtcttgcgatgattatcatataatttctgttgaattacgttaagcatgtaataattaacatgtaatgcatgacgttatttatgagatgggtttttatgattagagtcccgcaattatacatttaatacgcgatagaaaacaaaatatagcgcgcaaactaggataaattatcgcgcgcggtgtcatctatgttactagatcttcgaagaattcattatgtggtctaggtaggttctatatataagaaaacttgaaatgttctaaaaaaaaattcaagcccatgcatgattgaagcaaacggtatagcaacggtgttaacctgatctagtgatctcttgcaatccttaacggccacctaccgcaggtagcaaacggcgtccccctcctcgatatctccgcggcgacctctggctttttccgcggaattgcgcggtggggacggattccacgagaccgcgacgcaaccgcctctcgccgctgggccccacaccgctcggtgccgtagcctcacgggactctttctccctcctcccccgttataaattggcttcatcccctccttgcctcatccatccaaatcccagtccccaatcccatcccttcgtaggagaaattcatcgaagctaagcgaatcctcgcgatcctctcaaggtactgcgagttttcgatccccctctcgacccctcgtatgtttgtgtttgtcgtagcgtttgattaggtatgctttccctgtttgtgttcgtcgtagcgtttgattaggtatgctttccctgttcgtgttcatcgtagtgtttgattaggtcgtgtgaggcgatggcctgctcgcgtccttcgatctgtagtcgatttgcgggtcgtggtgtagatctgcgggctgtgatgaagttatttggtgtgatctgctcgcctgattctgcgggttggctcgagtagatatgatggttggaccggttggttcgtttaccgcgctagggttgggctgggatgatgttgcatgcgccgttgcgcgtgatcccgcagcaggacttgcgtttgattgccagatctcgttacgattatgtgatttggtttggactttttagatctgtagcttctgcttatgtgccagatgcgcctactgctcatatgcctgatgataatcataaatggctgtggaactaactagttgattgcggagtcatgtatcagctacaggtgtagggactagctacaggtgtagggacttgcgtctaattgtttggtcctttactcatgttgcaattatgcaatttagtttagattgtttgttccactcatctaggctgtaaaagggacactgcttagattgctgtttaatctttttagtagattatattatattggtaacttattacccctattacatgccatacgtgacttctgctcatgcctgatgataatcatagatcactgtggaattaattagttgattgttgaatcatgtttcatgtacataccacggcacaattgcttagttccttaacaaatgcaaattttactgatccatgtatgatttgcgtggttctctaatgtgaaatactatagctacttgttagtaagaatcaggttcgtatgcttaatgctgtatgtgccttctgctcatgcctgatgataatcatatatcactggaattaattagttgatcgtttaatcatatatcaagtacataccatgccacaatttttagtcacttaacccatgcagattgaactggtccctgcatgttttgctaaattgttctattctgattagaccatatatcatgtatttttttttggtaatggttctcttattttaaatgctatatagttctggtacttgttagaaagatctgcttcatagtttagttgcctatccctcgaattaggatgctgagcagctgatcctatagctttgtttcatgtatcaattcttttgtgttcaacagtcagtttttgttagattcattgtaacttatggtcgcttactcttctggtcctcaatgcttgcaggggatccaaattactgatgagtccgtgaggacgaaacgagtaagctcgtctaatttctactaagtgtagatatgcatgtgctagctggtggactggccggcatggtcccagcctcctcgctggcgccggctgggcaacatgcttcggcatggcgaatgggacgatcgttcaaacatttggcaataaagtttcttaagattgaatcctgttgccggtcttgcgatgattatcatataatttctgttgaattacgttaagcatgtaataattaacatgtaatgcatgacgttatttatgagatgggtttttatgattagagtcccgcaattatacatttaatacgcgatagaaaacaaaatatagcgcgcaaactaggataaattatcgcgcgcggtgtcatctatgttactagatccggaccgcgcctgcagtgcagcgtgacccggtcgtgcccctctctagagataatgagcattgcatgtctaagttataaaaaattaccacatattttttttgtcacacttgtttgaagtgcagtttatctatctttatacatatatttaaactttactctacgaataatataatctatagtactacaataatatcagtgttttagagaatcatataaatgaacagttagacatggtctaaaggacaattgagtattttgacaacaggactctacagttttatctttttagtgtgcatgtgttctcctttttttttgcaaatagcttcacctatataatacttcatccattttattagtacatccatttagggtttagggttaatggtttttatagactaatttttttagtacatctattttattctattttagcctctaaattaagaaaactaaaactctattttagtttttttatttaataatttagatataaaatagaataaaataaagtgactaaaaattaaacaaataccctttaagaaattaaaaaaactaaggaaacatttttcttgtttcgagtagataatgccagcctgttaaacgccgtcgacgagtctaacggacaccaaccagcgaaccagcagcgtcgcgtcgggccaagcgaagcagacggcacggcatctctgtcgctgcctctggacccctctcgagagttccgctccaccgttggacttgctccgctgtcggcatccagaaattgcgtggcggagcggcagacgtgagccggcacggcaggcggcctcctcctcctctcacggcaccggcagctacgggggattcctttcccaccgctccttcgctttcccttcctcgcccgccgtaataaatagacaccccctccacaccctctttccccaacctcgtgttgttcggagcgcacacacacacaaccagatctcccccaaatccacccgtcggcacctccgcttcaaggtacgccgctcgtcctcccccccccccctctctaccttctctagatcggcgttccggtccatggttagggcccggtagttctacttctgttcatgtttgtgttagatccgtgtttgtgttagatccgtgctgctagcgttcgtacacggatgcgacctgtacgtcagacacgttctgattgctaacttgccagtgtttctctttggggaatcctgggatggctctagccgttccgcagacgggatcgatttcatgattttttttgtttcgttgcatagggtttggtttgcccttttcctttatttcaatatatgccgtgcacttgtttgtcgggtcatcttttcatgcttttttttgtcttggttgtgatgatgtggtctggttgggcggtcgttctagatcggagtagaattctgtttcaaactacctggtggatttattaattttggatctgtatgtgtgtgccatacatattcatagttacgaattgaagatgatggatggaaatatcgatctaggataggtatacatgttgatgcgggttttactgatgcatatacagagatgctttttgttcgcttggttgtgatgatgtggtgtggttgggcggtcgttcattcgttctagatcggagtagaatactgtttcaaactacctggtgtatttattaattttggaactgtatgtgtgtgtcatacatcttcatagttacgagtttaagatggatggaaatatcgatctaggataggtatacatgttgatgtgggttttactgatgcatatacatgatggcatatgcagcatctattcatatgctctaaccttgagtacctatctattataataaacaagtatgttttataattattttgatcttgatatacttggatgatggcatatgcagcagctatatgtggatttttttagccctgccttcatacgctatttatttgcttggtactgtttcttttgtcgatgctcaccctgttgtttggtgttacttctgcagggatccggcagcagccatgcagaagctgatcaacagcgtgcagaactacgcctggggcagcaagaccgccctgaccgagctgtacggcatggagaaccccagcagccagcccatggccgagctgtggatgggcgcccaccccaagagcagcagccgcgtgcagaacgccgccggcgacatcgtgagcctgcgcgacgtgatcgagagcgacaagagcaccctgctgggcgaggccgtggccaagcgcttcggcgagctgcccttcctgttcaaggtgctgtgcgccgcccagcccctgagcatccaggtgcaccccaacaagcacaacagcgagatcggcttcgccaaggagaacgccgccggcatccccatggacgccgccgagcgcaactacaaggaccccaaccacaagcccgagctggtgttcgccctgacccccttcctggccatgaacgccttccgcgagttcagcgagatcgtgagcctgctgcagcccgtggccggcgcccaccccgccatcgcccacttcctgcagcagcccgacgccgagcgcctgagcgagctgttcgccagcctgctgaacatgcagggcgaggagaagagccgcgccctggccatcctgaagagcgccctggacagccagcagggcgagccctggcagaccatccgcctgatcagcgagttctaccccgaggacagcggcctgttcagccccctgctgctgaacgtggtgaagctgaaccccggcgaggccatgttcctgttcgccgagaccccccacgcctacctgcagggcgtggccctggaggtgatggccaacagcgacaacgtgctgcgcgccggcctgacccccaagtacatcgacatccccgagctggtggccaacgtgaagttcgaggccaagcccgccaaccagctgctgacccagcccgtgaagcagggcgccgagctggacttccccatccccgtggacgacttcgccttcagcctgcacgacctgagcgacaaggagaccaccatcagccagcagagcgccgccatcctgttctgcgtggagggcgacgccaccctgtggaagggcagccagcagctgcagctgaagcccggcgagagcgccttcatcgccgccaacgagagccccgtgaccgtgaagggccacggccgcctggcccgcgtgtacaacaagctgtgataggagctcgatccgtcgacctgcagatcgttcaaacatttggcaataaagtttcttaagattgaatcctgttgccggtcttgcgatgattatcatataatttctgttgaattacgttaagcatgtaataattaacatgtaatgcatgacgttatttatgagatgggtttttatgattagagtcccgcaattatacatttaatacgcgatagaaaacaaaatatagcgcgcaaactaggataaattatcgcgcgcggtgtcatctatgttactagatcggcgcgccgcaattgaagtttgggcggccagcatggccgtatccgcaatgtgttattaagttgtctaagcgtcaatttgtttacaccacaatatatcctgccaccagccagccaacagctccccgaccggcagctcggcacaaaatcaccactcgatacaggcagcccatcagaattaattctcatgtttgacagcttatcatcgactgcacggtgcaccaatgcttctggcgtcaggcagccatcggaagctgtggtatggctgtgcaggtcgtaaatcactgcataattcgtgtcgctcaaggcgcactcccgttctggataatgttttttgcgccgacatcataacggttctggcaaatattctgaaatgagctgttgacaattaatcatccggctcgtataatgtgtggaattgtgagcggataacaatttcacacaggaaacagaccatgagggaagcgttgatcgccgaagtatcgactcaactatcagaggtagttggcgtcatcgagcgccatctcgaaccgacgttgctggccgtacatttgtacggctccgcagtggatggcggcctgaagccacacagtgatattgatttgctggttacggtgaccgtaaggcttgatgaaacaacgcggcgagctttgatcaacgaccttttggaaacttcggcttcccctggagagagcgagattctccgcgctgtagaagtcaccattgttgtgcacgacgacatcattccgtggcgttatccagctaagcgcgaactgcaatttggagaatggcagcgcaatgacattcttgcaggtatcttcgagccagccacgatcgacattgatctggctatcttgctgacaaaagcaagagaacatagcgttgccttggtaggtccagcggcggaggaactctttgatccggttcctgaacaggatctatttgaggcgctaaatgaaaccttaacgctatggaactcgccgcccgactgggctggcgatgagcgaaatgtagtgcttacgttgtcccgcatttggtacagcgcagtaaccggcaaaatcgcgccgaaggatgtcgctgccgactgggcaatggagcgcctgccggcccagtatcagcccgtcatacttgaagctaggcaggcttatcttggacaagaagatcgcttggcctcgcgcgcagatcagttggaagaatttgttcactacgtgaaaggcgagatcaccaaagtagtcggcaaataaagctctagtggatctccgtacccggggatctggctcgcggcggacgcacgacgccggggcgagaccataggcgatctcctaaatcaatagtagctgtaacctcgaagcgtttcacttgtaacaacgattgagaatttttgtcataaaattgaaatacttggttcgcatttttgtcatccgcggtcagccgcaattctgacgaactgcccatttagctggagatgattgtacatccttcacgtgaaaatttctcaagcgctgtgaacaagggttcagattttagattgaaaggtgagccgttgaaacacgttcttcttgtcgatgacgacgtcgctatgcggcatcttattattgaataccttacgatccacgccttcaaagtgaccgcggtagccgacagcacccagttcacaagagtactctcttccgcgacggtcgatgtcgtggttgttgatctagatttaggtcgtgaagatgggctcgagctaggagcaagtgattttatcgctaagccgttcagtatcagagagtttctagcacgcattcgggttgccttgcgcgtgcgccccaacgttgtccgctccaaagaccgacggtctttttgttttactgactggacacttaatctcaggcaacgtcgcttgatgtccgaagctggcggtgaggtgaaacttacggcaggtgagttcaatcttctcctcgcgtttttagagaaaccccgcgacgttctatcgcgcgagcaacttctcattgccagtcgagtacgcgacgaggaggtttatgacaggagtatagatgttctcattttgaggctgcgccgcaaacttgaggcagatccgtcaagccctcaactgataaaaacagcaagaggtgccggttatttctttgacgcggacgtgcaggtttcgcacggggggacgatggcagcctgagccaattcccagatccccgaggaatcggcgtgagcggtcgcaaaccatccggcccggtacaaatcggcgcggcgctgggtgatgacctggtggagaagttgaaggccgcgcaggccgcccagcggcaacgcatcgaggcagaagcacgccccggtgaatcgtggcaagcggccgctgatcgaatccgcaaagaatcccggcaaccgccggcagccggtgcgccgtcgattaggaagccgcccaagggcgacgagcaaccagattttttcgttccgatgctctatgacgtgggcacccgcgatagtcgcagcatcatggacgtggccgttttccgtctgtcgaagcgtgaccgacgagctggcgaggtgatccgctacgagcttccagacgggcacgtagaggtttccgcagggccggccggcatggccagtgtgtgggattacgacctggtactgatggcggtttcccatctaaccgaatccatgaaccgataccgggaagggaagggagacaagcccggccgcgtgttccgtccacacgttgcggacgtactcaagttctgccggcgagccgatggcggaaagcagaaagacgacctggtagaaacctgcattcggttaaacaccacgcacgttgccatgcagcgtacgaagaaggccaagaacggccgcctggtgacggtatccgagggtgaagccttgattagccgctacaagatcgtaaagagcgaaaccgggcggccggagtacatcgagatcgagctagctgattggatgtaccgcgagatcacagaaggcaagaacccggacgtgctgacggttcaccccgattactttttgatcgatcccggcatcggccgttttctctaccgcctggcacgccgcgccgcaggcaaggcagaagccagatggttgttcaagacgatctacgaacgcagtggcagcgccggagagttcaagaagttctgtttcaccgtgcgcaagctgatcgggtcaaatgacctgccggagtacgatttgaaggaggaggcggggcaggctggcccgatcctagtcatgcgctaccgcaacctgatcgagggcgaagcatccgccggttcctaatgtacggagcagatgctagggcaaattgccctagcaggggaaaaaggtcgaaaaggtctctttcctgtggatagcacgtacattgggaacccaaagccgtacattgggaaccggaacccgtacattgggaacccaaagccgtacattgggaaccggtcacacatgtaagtgactgatataaaagagaaaaaaggcgatttttccgcctaaaactctttaaaacttattaaaactcttaaaacccgcctggcctgtgcataactgtctggccagcgcacagccgaagagctgcaaaaagcgcctacccttcggtcgctgcgctccctacgccccgccgcttcgcgtcggcctatcgcggccgctggccgctcaaaaatggctggcctacggccaggcaatctaccagggcgcggacaagccgcgccgtcgccactcgaccgccggcgctgaggtctgcctcgtgaagaaggtgttgctgactcataccaggcctgaatcgccccatcatccagccagaaagtgagggagccacggttgatgagagctttgttgtaggtggaccagttggtgattttgaacttttgctttgccacggaacggtctgcgttgtcgggaagatgcgtgatctgatccttcaactcagcaaaagttcgatttattcaacaaagccgccgtcccgtcaagtcagcgtaatgctctgccagtgttacaaccaattaaccaattctgattagaaaaactcatcgagcatcaaatgaaactgcaatttattcatatcaggattatcaataccatatttttgaaaaagccgtttctgtaatgaaggagaaaactcaccgaggcagttccataggatggcaagatcctggtatcggtctgcgattccgactcgtccaacatcaatacaacctattaatttcccctcgtcaaaaataaggttatcaagtgagaaatcaccatgagtgacgactgaatccggtgagaatggcaaaagctctgcattaatgaatcggccaacgcgcggggagaggcggtttgcgtattgggcgctcttccgcttcctcgctcactgactcgctgcgctcggtcgttcggctgcggcgagcggtatcagctcactcaaaggcggtaatacggttatccacagaatcaggggataacgcaggaaagaacatgtgagcaaaaggccagcaaaaggccaggaaccgtaaaaaggccgcgttgctggcgtttttccataggctccgcccccctgacgagcatcacaaaaatcgacgctcaagtcagaggtggcgaaacccgacaggactataaagataccaggcgtttccccctggaagctccctcgtgcgctctcctgttccgaccctgccgcttaccggatacctgtccgcctttctcccttcgggaagcgtggcgctttctcatagctcacgctgtaggtatctcagttcggtgtaggtcgttcgctccaagctgggctgtgtgcacgaaccccccgttcagcccgaccgctgcgccttatccggtaactatcgtcttgagtccaacccggtaagacacgacttatcgccactggcagcagccactggtaacaggattagcagagcgaggtatgtaggcggtgctacagagttcttgaagtggtggcctaactacggctacactagaagaacagtatttggtatctgcgctctgctgaagccagttaccttcggaaaaagagttggtagctcttgatccggcaaacaaaccaccgctggtagcggtggtttttttgtttgcaagcagcagattacgcgcagaaaaaaaggatctcaagaagatcctttgatcttttctacggggtctgacgctcagtggaacgaaaactcacgttaagggattttggtcatgagattatcaaaaaggatcttcacctagatccttttgatccggacaaacaaacaaatacagtaatttagccaggacgtcggccgaaagagcgacaagcagatcacgcttttcgacagcgtcggatttgcgatcgaggatttttcggcgctgcgctacgtccgcgaccgcgttgagggatcaagccacagcagcccactcgaccttctagccgacccagacgagccaagggatctttttggaatgctgctccgtcgtcaggctttccgacgtttgggtggttgaacagaagtcattatcgcacggaatgccaagcactcccgagggg

SEQ ID NO: 313 - DNA, 17284 bp, synthetic construct
  source 1..17284: mol_type = other DNA; note = CPF1 RICE EXPRESSION VECTOR
aaccctgtggttggcatgcacatacaaatggacgaacggataaaccttttcacgcccttttaaatatccgattattctaataaacgctcttttctcttaggtttacccgccaatatatcctgtcaaacactgatagtttaaactggcactagcctaacggtgttgactaactaggccgcttccctaattagctaaggtaccggcgcgccaccggtgagctcgggacccgaattcattatgtggtctaggtaggttctatatataagaaaacttgaaatgttctaaaaaaaaattcaagcccatgcatgattgaagcaaacggtatagcaacggtgttaacctgatctagtgatctcttgcaatccttaacggccacctaccgcaggtagcaaacggcgtccccctcctcgatatctccgcggcgacctctggctttttccgcggaattgcgcggtggggacggattccacgagaccgcgacgcaaccgcctctcgccgctgggccccacaccgctcggtgccgtagcctcacgggactctttctccctcctcccccgttataaattggcttcatcccctccttgcctcatccatccaaatcccagtccccaatcccatcccttcgtaggagaaattcatcgaagctaagcgaatcctcgcgatcctctcaaggtactgcgagttttcgatccccctctcgacccctcgtatgtttgtgtttgtcgtagcgtttgattaggtatgctttccctgtttgtgttcgtcgtagcgtttgattaggtatgctttccctgttcgtgttcatcgtagtgtttgattaggtcgtgtgaggcgatggcctgctcgcgtccttcgatctgtagtcgatttgcgggtcgtggtgtagatctgcgggctgtgatgaagttatttggtgtgatctgctcgcctgattctgcgggttggctcgagtagatatgatggttggaccggttggttcgtttaccgcgctagggttgggctgggatgatgttgcatgcgccgttgcgcgtgatcccgcagcaggacttgcgtttgattgccagatctcgttacgattatgtgatttggtttggactttttagatctgtagcttctgcttatgtgccagatgcgcctactgctcatatgcctgatgataatcataaatggctgtggaactaactagttgattgcggagtcatgtatcagctacaggtgtagggactagctacaggtgtagggacttgcgtctaattgtttggtcctttactcatgttgcaattatgcaatttagtttagattgtttgttccactcatctaggctgtaaaagggacactgcttagattgctgtttaatctttttagtagattatattatattggtaacttattacccctattacatgccatacgtgacttctgctcatgcctgatgataatcatagatcactgtggaattaattagttgattgttgaatcatgtttcatgtacataccacggcacaattgcttagttccttaacaaatgcaaattttactgatccatgtatgatttgcgtggttctctaatgtgaaatactatagctacttgttagtaagaatcaggttcgtatgcttaatgctgtatgtgccttctgctcatgcctgatgataatcatatatcactggaattaattagttgatcgtttaatcatatatcaagtacataccatgccacaatttttagtcacttaacccatgcagattgaactggtccctgcatgttttgctaaattgttctattctgattagaccatatatcatgtatttttttttggtaatggttctcttattttaaatgctatatagttctggtacttgttagaaagatctgcttcatagtttagttgcctatccctcgaattaggatgctgagcagctgatcctatagctttgtttcatgtatcaattcttttgtgttcaacagtcagtttttgttagattcattgtaacttatggtcgcttactcttctggtcctcaatgcttgcagggatcccctaaatagaccatggctcctaagaagaagcggaaggttggtattcacggggtgcctgcggcttcaaagctcgagaaattcaccaactgttattcgttgagcaaaacactgcggtttaaagcgattccagtcggcaagactcaagagaatatagacaataagcggctgttggtggaagatgaaaagcgcgcggaagactacaaaggggtgaagaagttgttggacagatactacctctcttttatcaatgatgtcttgcactcaatcaaattgaagaatctgaacaactacatctccctcttcagaaagaaaacaaggacagaaaaggagaataaggaacttgaaaatttggagatcaatctgaggaaagagatcgcgaaagcctttaaaggcaacgaaggatacaaaagtctgttcaagaaggatataattgagacaattttgccagagttcctcgatgacaaggacgagattgcgctggtcaattcgttcaacggattcacaacagcattcacaggcttctttgataatcgggaaaatatgttctctgaggaggcaaagtccacttctattgcgttcaggtgtatcaatgagaatctcactaggtacatttccaacatggatatctttgagaaggttgacgcaatttttgacaagcacgaagttcaggagattaaggagaagatcctcaattccgattatgacgttgaggacttcttcgagggtgagttttttaatttcgtgctcactcaagagggtatcgacgtgtataatgcgatcatcggtgggttcgtgactgagtccggtgaaaagattaagggattgaacgagtatatcaacctttacaaccaaaagacgaaacagaagctgccaaagttcaagcctctttacaaacaggttctttcagaccgcgagtcactctcgttctatggggagggctacacttcggatgaggaagtcctggaggtgttcaggaatactctcaataagaattcggagattttctcttctataaaaaaactggaaaagttgtttaagaattttgacgaatactctagcgccggcatatttgtgaaaaacggcccggccatatcaacgataagtaaagatatcttcggcgaatggaacgtgatcagagacaaatggaacgcggagtatgacgatattcacctgaagaagaaggctgtcgtaacggagaagtacgaggatgatcgcaggaaaagcttcaaaaagatcggaagtttcagcctggaacagttgcaggagtatgctgacgccgatcttagcgtcgtcgagaagttgaaggagataatcatccaaaaggtcgacgagatatataaagtctatggatcaagtgaaaaactgttcgacgccgacttcgttttggagaagtccctgaagaagaacgacgctgttgttgccattatgaaggatctgctcgacagcgtgaagagtttcgagaactatattaaggcttttttcggggaggggaaggagactaacagagatgagtccttctacggagacttcgtcctcgcgtacgatatactccttaaggtagaccacatctacgacgcaatcagaaattacgtgacacaaaagccgtacagcaaggacaagttcaaactctacttccagaacccccagttcatgggcggctgggacaaggacaaggaaacggattacagggctacgatcctgaggtatggttcaaaatactacttggcgattatggacaagaagtacgccaagtgtctccagaagattgacaaagacgatgtcaatggcaattatgagaagatcaactacaagctgcttccgggtccgaacaagatgctcccaaaggttttcttcagcaagaaatggatggcctactataacccaagcgaggacatccagaagatttataagaacggtacgttcaagaagggcgacatgttcaatcttaacgactgtcacaagctgatcgacttcttcaaagactcaattagccggtacccaaagtggtctaacgcctatgacttcaacttttcggaaaccgagaagtacaaggatatagccggattttatagagaggtggaagagcagggctacaaggtgtcattcgagtccgccagcaagaaggaagtggacaagctcgtggaagagggtaagctctacatgttccagatttataataaagactttagcgataagagccacgggacacctaatctccacacaatgtatttcaagctgctcttcgacgagaataaccacggccaaatcaggttgtcaggaggggctgaactcttcatgcggcgcgctagccttaagaaggaggagcttgtagtccaccctgcgaatagtccaattgcgaataagaacccggacaatcctaaaaagactacaacattgagctacgacgtgtacaaggataagaggttttccgaggatcagtacgagctccacatcccgattgcgatcaacaagtgcccaaagaatattttcaagataaacacagaggtgcgtgtactcctgaagcatgacgacaatccttacgtcattgggattgatcggggcgagaggaacctcctctatattgtggtggtggacgggaaggggaacatagtcgaacagtactcccttaacgaaataattaacaatttcaacggcatccgtatcaagaccgactaccattcgttgctggacaagaaggagaaggagagatttgaggcgcggcaaaattggacaagtatcgagaacatcaaggaactcaaagcaggttatatctctcaagttgtgcataagatatgcgagctggttgagaagtatgacgcagtgatcgctcttgaggacctcaactcgggctttaagaattctagagttaaagtggagaagcaggtctatcaaaagttcgagaagatgcttatagataagctcaactacatggtcgataagaaatcgaacccatgtgccaccggcggcgcactcaaaggttaccaaataacaaacaaattcgagtccttcaaatcgatgagtactcagaatgggttcatattttatataccggcgtggcttacgtctaagatcgacccgtcaactggttttgtcaacctgttgaagacgaaatacacgtccattgccgattcaaaaaagttcatatctagttttgatcgtattatgtacgtcccagaggaagatcttttcgagtttgctctcgactacaaaaacttttcgcgcaccgatgcggattacattaaaaaatggaaactctattcgtacggcaacagaatcaggatttttcgcaaccctaagaagaataacgtctttgattgggaggaagtttgcttgactagcgcgtacaaggagctctttaataagtatggcattaactaccaacagggtgatatcagagcactgctttgcgaacaatctgacaaggctttctactcatccttcatggctttgatgagcctgatgctccagatgagaaattcaattacaggcagaaccgacgtggatttcttgatctccccggttaaaaattctgatggcatcttttacgatagcaggaactatgaagcgcaagagaatgcgattctgccaaaaaatgcagacgccaacggtgcctataacatcgccaggaaagtcctgtgggcgatcggccagttcaaaaaggccgaagacgaaaaattggacaaggtcaaaatcgctatcagcaacaaagagtggctggagtatgctcagacatccgtaaagcataagcgtcctgctgccaccaaaaaggccggacaggctaagaaaaagaagtgattaattaagatcgttcaaacatttggcaataaagtttcttaagattgaatcctgttgccggtcttgcgatgattatcatataatttctgttgaattacgttaagcatgtaataattaacatgtaatgcatgacgttatttatgagatgggtttttatgattagagtcccgcaattatacatttaatacgcgatagaaaacaaaatatagcgcgcaaactaggataaattatcgcgcgcggtgtcatctatgttactagatcttcgaagaattcattatgtggtctaggtaggttctatatataagaaaacttgaaatgttctaaaaaaaaattcaagcccatgcatgattgaagcaaacggtatagcaacggtgttaacctgatctagtgatctcttgcaatccttaacggccacctaccgcaggtagcaaacggcgtccccctcctcgatatctccgcggcgacctctggctttttccgcggaattgcgcggtggggacggattccacgagaccgcgacgcaaccgcctctcgccgctgggccccacaccgctcggtgccgtagcctcacgggactctttctccctcctcccccgttataaattggcttcatcccctccttgcctcatccatccaaatcccagtccccaatcccatcccttcgtaggagaaattcatcgaagctaagcgaatcctcgcgatcctctcaaggtactgcgagttttcgatccccctctcgacccctcgtatgtttgtgtttgtcgtagcgtttgattaggtatgctttccctgtttgtgttcgtcgtagcgtttgattaggtatgctttccctgttcgtgttcatcgtagtgtttgattaggtcgtgtgaggcgatggcctgctcgcgtccttcgatctgtagtcgatttgcgggtcgtggtgtagatctgcgggctgtgatgaagttatttggtgtgatctgctcgcctgattctgcgggttggctcgagtagatatgatggttggaccggttggttcgtttaccgcgctagggttgggctgggatgatgttgcatgcgccgttgcgcgtgatcccgcagcaggacttgcgtttgattgccagatctcgttacgattatgtgatttggtttggactttttagatctgtagcttctgcttatgtgccagatgcgcctactgctcatatgcctgatgataatcataaatggctgtggaactaactagttgattgcggagtcatgtatcagctacaggtgtagggactagctacaggtgtagggacttgcgtctaattgtttggtcctttactcatgttgcaattatgcaatttagtttagattgtttgttccactcatctaggctgtaaaagggacactgcttagattgctgtttaatctttttagtagattatattatattggtaacttattacccctattacatgccatacgtgacttctgctcatgcctgatgataatcatagatcactgtggaattaattagttgattgttgaatcatgtttcatgtacataccacggcacaattgcttagttccttaacaaatgcaaattttactgatccatgtatgatttgcgtggttctctaatgtgaaatactatagctacttgttagtaagaatcaggttcgtatgcttaatgctgtatgtgccttctgctcatgcctgatgataatcatatatcactggaattaattagttgatcgtttaatcatatatcaagtacataccatgccacaatttttagtcacttaacccatgcagattgaactggtccctgcatgttttgctaaattgttctattctgattagaccatatatcatgtatttttttttggtaatggttctcttattttaaatgctatatagttctggtacttgttagaaagatctgcttcatagtttagttgcctatccctcgaattaggatgctgagcagctgatcctatagctttgtttcatgtatcaattcttttgtgttcaacagtcagtttttgttagattcattgtaacttatggtcgcttactcttctggtcctcaatgcttgcaggggatccaaattactgatgagtccgtgaggacgaaacgagtaagctcgtctaatttctactaagtgtagatatgcatgtgctagttggtggacaggccggcatggtcccagcctcctcgctggcgccggctgggcaacatgcttcggcatggcgaatgggacgatcgttcaaacatttggcaataaagtttcttaagattgaatcctgttgccggtcttgcgatgattatcatataatttctgttgaattacgttaagcatgtaataattaacatgtaatgcatgacgttatttatgagatgggtttttatgattagagtcccgcaattatacatttaatacgcgatagaaaacaaaatatagcgcgcaaactaggataaattatcgcgcgcggtgtcatctatgttactagatccggaccgcgcctgcagtgcagcgtgacccggtcgtgcccctctctagagataatgagcattgcatgtctaagttataaaaaattaccacatattttttttgtcacacttgtttgaagtgcagtttatctatctttatacatatatttaaactttactctacgaataatataatctatagtactacaataatatcagtgttttagagaatcatataaatgaacagttagacatggtctaaaggacaattgagtattttgacaacaggactctacagttttatctttttagtgtgcatgtgttctcctttttttttgcaaatagcttcacctatataatacttcatccattttattagtacatccatttagggtttagggttaatggtttttatagactaatttttttagtacatctattttattctattttagcctctaaattaagaaaactaaaactctattttagtttttttatttaataatttagatataaaatagaataaaataaagtgactaaaaattaaacaaataccctttaagaaattaaaaaaactaaggaaacatttttcttgtttcgagtagataatgccagcctgttaaacgccgtcgacgagtctaacggacaccaaccagcgaaccagcagcgtcgcgtcgggccaagcgaagcagacggcacggcatctctgtcgctgcctctggacccctctcgagagttccgctccaccgttggacttgctccgctgtcggcatccagaaattgcgtggcggagcggcagacgtgagccggcacggcaggcggcctcctcctcctctcacggcaccggcagctacgggggattcctttcccaccgctccttcgctttcccttcctcgcccgccgtaataaatagacaccccctccacaccctctttccccaacctcgtgttgttcggagcgcacacacacacaaccagatctcccccaaatccacccgtcggcacctccgcttcaaggtacgccgctcgtcctcccccccccccctctctaccttctctagatcggcgttccggtccatggttagggcccggtagttctacttctgttcatgtttgtgttagatccgtgtttgtgttagatccgtgctgctagcgttcgtacacggatgcgacctgtacgtcagacacgttctgattgctaacttgccagtgtttctctttggggaatcctgggatggctctagccgttccgcagacgggatcgatttcatgattttttttgtttcgttgcatagggtttggtttgcccttttcctttatttcaatatatgccgtgcacttgtttgtcgggtcatcttttcatgcttttttttgtcttggttgtgatgatgtggtctggttgggcggtcgttctagatcggagtagaattctgtttcaaactacctggtggatttattaattttggatctgtatgtgtgtgccatacatattcatagttacgaattgaagatgatggatggaaatatcgatctaggataggtatacatgttgatgcgggttttactgatgcatatacagagatgctttttgttcgcttggttgtgatgatgtggtgtggttgggcggtcgttcattcgttctagatcggagtagaatactgtttcaaactacctggtgtatttattaattttggaactgtatgtgtgtgtcatacatcttcatagttacgagtttaagatggatggaaatatcgatctaggataggtatacatgttgatgtgggttttactgatgcatatacatgatggcatatgcagcatctattcatatgctctaaccttgagtacctatctattataataaacaagtatgttttataattattttgatcttgatatacttggatgatggcatatgcagcagctatatgtggatttttttagccctgccttcatacgctatttatttgcttggtactgtttcttttgtcgatgctcaccctgttgtttggtgttacttctgcagggatccggcagcagccatgcagaagctgatcaacagcgtgcagaactacgcctggggcagcaagaccgccctgaccgagctgtacggcatggagaaccccagcagccagcccatggccgagctgtggatgggcgcccaccccaagagcagcagccgcgtgcagaacgccgccggcgacatcgtgagcctgcgcgacgtgatcgagagcgacaagagcaccctgctgggcgaggccgtggccaagcgcttcggcgagctgcccttcctgttcaaggtgctgtgcgccgcccagcccctgagcatccaggtgcaccccaacaagcacaacagcgagatcggcttcgccaaggagaacgccgccggcatccccatggacgccgccgagcgcaactacaaggaccccaaccacaagcccgagctggtgttcgccctgacccccttcctggccatgaacgccttccgcgagttcagcgagatcgtgagcctgctgcagcccgtggccggcgcccaccccgccatcgcccacttcctgcagcagcccgacgccgagcgcctgagcgagctgttcgccagcctgctgaacatgcagggcgaggagaagagccgcgccctggccatcctgaagagcgccctggacagccagcagggcgagccctggcagaccatccgcctgatcagcgagttctaccccgaggacagcggcctgttcagccccctgctgctgaacgtggtgaagctgaaccccggcgaggccatgttcctgttcgccgagaccccccacgcctacctgcagggcgtggccctggaggtgatggccaacagcgacaacgtgctgcgcgccggcctgacccccaagtacatcgacatccccgagctggtggccaacgtgaagttcgaggccaagcccgccaaccagctgctgacccagcccgtgaagcagggcgccgagctggacttccccatccccgtggacgacttcgccttcagcctgcacgacctgagcgacaaggagaccaccatcagccagcagagcgccgccatcctgttctgcgtggagggcgacgccaccctgtggaagggcagccagcagctgcagctgaagcccggcgagagcgccttcatcgccgccaacgagagccccgtgaccgtgaagggccacggccgcctggcccgcgtgtacaacaagctgtgataggagctcgatccgtcgacctgcagatcgttcaaacatttggcaataaagtttcttaagattgaatcctgttgccggtcttgcgatgattatcatataatttctgttgaattacgttaagcatgtaataattaacatgtaatgcatgacgttatttatgagatgggtttttatgattagagtcccgcaattatacatttaatacgcgatagaaaacaaaatatagcgcgcaaactaggataaattatcgcgcgcggtgtcatctatgttactagatcggcgcgccgcaattgaagtttgggcggccagcatggccgtatccgcaatgtgttattaagttgtctaagcgtcaatttgtttacaccacaatatatcctgccaccagccagccaacagctccccgaccggcagctcggcacaaaatcaccactcgatacaggcagcccatcagaattaattctcatgtttgacagcttatcatcgactgcacggtgcaccaatgcttctggcgtcaggcagccatcggaagctgtggtatggctgtgcaggtcgtaaatcactgcataattcgtgtcgctcaaggcgcactcccgttctggataatgttttttgcgccgacatcataacggttctggcaaatattctgaaatgagctgttgacaattaatcatccggctcgtataatgtgtggaattgtgagcggataacaatttcacacaggaaacagaccatgagggaagcgttgatcgccgaagtatcgactcaactatcagaggtagttggcgtcatcgagcgccatctcgaaccgacgttgctggccgtacatttgtacggctccgcagtggatggcggcctgaagccacacagtgatattgatttgctggttacggtgaccgtaaggcttgatgaaacaacgcggcgagctttgatcaacgaccttttggaaacttcggcttcccctggagagagcgagattctccgcgctgtagaagtcaccattgttgtgcacgacgacatcattccgtggcgttatccagctaagcgcgaactgcaatttggagaatggcagcgcaatgacattcttgcaggtatcttcgagccagccacgatcgacattgatctggctatcttgctgacaaaagcaagagaacatagcgttgccttggtaggtccagcggcggaggaactctttgatccggttcctgaacaggatctatttgaggcgctaaatgaaaccttaacgctatggaactcgccgcccgactgggctggcgatgagcgaaatgtagtgcttacgttgtcccgcatttggtacagcgcagtaaccggcaaaatcgcgccgaaggatgtcgctgccgactgggcaatggagcgcctgccggcccagtatcagcccgtcatacttgaagctaggcaggcttatcttggacaagaagatcgcttggcctcgcgcgcagatcagttggaagaatttgttcactacgtgaaaggcgagatcaccaaagtagtcggcaaataaagctctagtggatctccgtacccggggatctggctcgcggcggacgcacgacgccggggcgagaccataggcgatctcctaaatcaatagtagctgtaacctcgaagcgtttcacttgtaacaacgattgagaatttttgtcataaaattgaaatacttggttcgcatttttgtcatccgcggtcagccgcaattctgacgaactgcccatttagctggagatgattgtacatccttcacgtgaaaatttctcaagcgctgtgaacaagggttcagattttagattgaaaggtgagccgttgaaacacgttcttcttgtcgatgacgacgtcgctatgcggcatcttattattgaataccttacgatccacgccttcaaagtgaccgcggtagccgacagcacccagttcacaagagtactctcttccgcgacggtcgatgtcgtggttgttgatctagatttaggtcgtgaagatgggctcgagctaggagcaagtgattttatcgctaagccgttcagtatcagagagtttctagcacgcattcgggttgccttgcgcgtgcgccccaacgttgtccgctccaaagaccgacggtctttttgttttactgactggacacttaatctcaggcaacgtcgcttgatgtccgaagctggcggtgaggtgaaacttacggcaggtgagttcaatcttctcctcgcgtttttagagaaaccccgcgacgttctatcgcgcgagcaacttctcattgccagtcgagtacgcgacgaggaggtttatgacaggagtatagatgttctcattttgaggctgcgccgcaaacttgaggcagatccgtcaagccctcaactgataaaaacagcaagaggtgccggttatttctttgacgcggacgtgcaggtttcgcacggggggacgatggcagcctgagccaattcccagatccccgaggaatcggcgtgagcggtcgcaaaccatccggcccggtacaaatcggcgcggcgctgggtgatgacctggtggagaagttgaaggccgcgcaggccgcccagcggcaacgcatcgaggcagaagcacgccccggtgaatcgtggcaagcggccgctgatcgaatccgcaaagaatcccggcaaccgccggcagccggtgcgccgtcgattaggaagccgcccaagggcgacgagcaaccagattttttcgttccgatgctctatgacgtgggcacccgcgatagtcgcagcatcatggacgtggccgttttccgtctgtcgaagcgtgaccgacgagctggcgaggtgatccgctacgagcttccagacgggcacgtagaggtttccgcagggccggccggcatggccagtgtgtgggattacgacctggtactgatggcggtttcccatctaaccgaatccatgaaccgataccgggaagggaagggagacaagcccggccgcgtgttccgtccacacgttgcggacgtactcaagttctgccggcgagccgatggcggaaagcagaaagacgacctggtagaaacctgcattcggttaaacaccacgcacgttgccatgcagcgtacgaagaaggccaagaacggccgcctggtgacggtatccgagggtgaagccttgattagccgctacaagatcgtaaagagcgaaaccgggcggccggagtacatcgagatcgagctagctgattggatgtaccgcgagatcacagaaggcaagaacccggacgtgctgacggttcaccccgattactttttgatcgatcccggcatcggccgttttctctaccgcctggcacgccgcgccgcaggcaaggcagaagccagatggttgttcaagacgatctacgaacgcagtggcagcgccggagagttcaagaagttctgtttcaccgtgcgcaagctgatcgggtcaaatgacctgccggagtacgatttgaaggaggaggcggggcaggctggcccgatcctagtcatgcgctaccgcaacctgatcgagggcgaagcatccgccggttcctaatgtacggagcagatgctagggcaaattgccctagcaggggaaaaaggtcgaaaaggtctctttcctgtggatagcacgtacattgggaacccaaagccgtacattgggaaccggaacccgtacattgggaacccaaagccgtacattgggaaccggtcacacatgtaagtgactgatataaaagagaaaaaaggcgatttttccgcctaaaactctttaaaacttattaaaactcttaaaacccgcctggcctgtgcataactgtctggccagcgcacagccgaagagctgcaaaaagcgcctacccttcggtcgctgcgctccctacgccccgccgcttcgcgtcggcctatcgcggccgctggccgctcaaaaatggctggcctacggccaggcaatctaccagggcgcggacaagccgcgccgtcgccactcgaccgccggcgctgaggtctgcctcgtgaagaaggtgttgctgactcataccaggcctgaatcgccccatcatccagccagaaagtgagggagccacggttgatgagagctttgttgtaggtggaccagttggtgattttgaacttttgctttgccacggaacggtctgcgttgtcgggaagatgcgtgatctgatccttcaactcagcaaaagttcgatttattcaacaaagccgccgtcccgtcaagtcagcgtaatgctctgccagtgttacaaccaattaaccaattctgattagaaaaactcatcgagcatcaaatgaaactgcaatttattcatatcaggattatcaataccatatttttgaaaaagccgtttctgtaatgaaggagaaaactcaccgaggcagttccataggatggcaagatcctggtatcggtctgcgattccgactcgtccaacatcaatacaacctattaatttcccctcgtcaaaaataaggttatcaagtgagaaatcaccatgagtgacgactgaatccggtgagaatggcaaaagctctgcattaatgaatcggccaacgcgcggggagaggcggtttgcgtattgggcgctcttccgcttcctcgctcactgactcgctgcgctcggtcgttcggctgcggcgagcggtatcagctcactcaaaggcggtaatacggttatccacagaatcaggggataacgcaggaaagaacatgtgagcaaaaggccagcaaaaggccaggaaccgtaaaaaggccgcgttgctggcgtttttccataggctccgcccccctgacgagcatcacaaaaatcgacgctcaagtcagaggtggcgaaacccgacaggactataaagataccaggcgtttccccctggaagctccctcgtgcgctctcctgttccgaccctgccgcttaccggatacctgtccgcctttctcccttcgggaagcgtggcgctttctcatagctcacgctgtaggtatctcagttcggtgtaggtcgttcgctccaagctgggctgtgtgcacgaaccccccgttcagcccgaccgctgcgccttatccggtaactatcgtcttgagtccaacccggtaagacacgacttatcgccactggcagcagccactggtaacaggattagcagagcgaggtatgtaggcggtgctacagagttcttgaagtggtggcctaactacggctacactagaagaacagtatttggtatctgcgctctgctgaagccagttaccttcggaaaaagagttggtagctcttgatccggcaaacaaaccaccgctggtagcggtggtttttttgtttgcaagcagcagattacgcgcagaaaaaaaggatctcaagaagatcctttgatcttttctacggggtctgacgctcagtggaacgaaaactcacgttaagggattttggtcatgagattatcaaaaaggatcttcacctagatccttttgatccggacaaacaaacaaatacagtaatttagccaggacgtcggccgaaagagcgacaagcagatcacgcttttcgacagcgtcggatttgcgatcgaggatttttcggcgctgcgctacgtccgcgaccgcgttgagggatcaagccacagcagcccactcgaccttctagccgacccagacgagccaagggatctttttggaatgctgctccgtcgtcaggctttccgacgtttgggtggttgaacagaagtcattatcgcacggaatgccaagcactcccgagggg

SEQ ID NO: 314 - DNA, 17284 bp, synthetic construct
  source 1..17284: mol_type = other DNA; note = CPF1 SUNFLOWER EXPRESSION VECTOR
aaccctgtggttggcatgcacatacaaatggacgaacggataaaccttttcacgcccttttaaatatccgattattctaataaacgctcttttctcttaggtttacccgccaatatatcctgtcaaacactgatagtttaaactggcactagcctaacggtgttgactaactaggccgcttccctaattagctaaggtaccggcgcgccaccggtgagctcgggacccgaattcattatgtggtctaggtaggttctatatataagaaaacttgaaatgttctaaaaaaaaattcaagcccatgcatgattgaagcaaacggtatagcaacggtgttaacctgatctagtgatctcttgcaatccttaacggccacctaccgcaggtagcaaacggcgtccccctcctcgatatctccgcggcgacctctggctttttccgcggaattgcgcggtggggacggattccacgagaccgcgacgcaaccgcctctcgccgctgggccccacaccgctcggtgccgtagcctcacgggactctttctccctcctcccccgttataaattggcttcatcccctccttgcctcatccatccaaatcccagtccccaatcccatcccttcgtaggagaaattcatcgaagctaagcgaatcctcgcgatcctctcaaggtactgcgagttttcgatccccctctcgacccctcgtatgtttgtgtttgtcgtagcgtttgattaggtatgctttccctgtttgtgttcgtcgtagcgtttgattaggtatgctttccctgttcgtgttcatcgtagtgtttgattaggtcgtgtgaggcgatggcctgctcgcgtccttcgatctgtagtcgatttgcgggtcgtggtgtagatctgcgggctgtgatgaagttatttggtgtgatctgctcgcctgattctgcgggttggctcgagtagatatgatggttggaccggttggttcgtttaccgcgctagggttgggctgggatgatgttgcatgcgccgttgcgcgtgatcccgcagcaggacttgcgtttgattgccagatctcgttacgattatgtgatttggtttggactttttagatctgtagcttctgcttatgtgccagatgcgcctactgctcatatgcctgatgataatcataaatggctgtggaactaactagttgattgcggagtcatgtatcagctacaggtgtagggactagctacaggtgtagggacttgcgtctaattgtttggtcctttactcatgttgcaattatgcaatttagtttagattgtttgttccactcatctaggctgtaaaagggacactgcttagattgctgtttaatctttttagtagattatattatattggtaacttattacccctattacatgccatacgtgacttctgctcatgcctgatgataatcatagatcactgtggaattaattagttgattgttgaatcatgtttcatgtacataccacggcacaattgcttagttccttaacaaatgcaaattttactgatccatgtatgatttgcgtggttctctaatgtgaaatactatagctacttgttagtaagaatcaggttcgtatgcttaatgctgtatgtgccttctgctcatgcctgatgataatcatatatcactggaattaattagttgatcgtttaatcatatatcaagtacataccatgccacaatttttagtcacttaacccatgcagattgaactggtccctgcatgttttgctaaattgttctattctgattagaccatatatcatgtatttttttttggtaatggttctcttattttaaatgctatatagttctggtacttgttagaaagatctgcttcatagtttagttgcctatccctcgaattaggatgctgagcagctgatcctatagctttgtttcatgtatcaattcttttgtgttcaacagtcagtttttgttagattcattgtaacttatggtcgcttactcttctggtcctcaatgcttgcagggatcccctaaatagaccatggctcctaagaagaagcggaaggttggtattcacggggtgcctgcggcttcaaagctcgagaaattcaccaactgttattcgttgagcaaaacactgcggtttaaagcgattccagtcggcaagactcaagagaatatagacaataagcggctgttggtggaagatgaaaagcgcgcggaagactacaaaggggtgaagaagttgttggacagatactacctctcttttatcaatgatgtcttgcactcaatcaaattgaagaatctgaacaactacatctccctcttcagaaagaaaacaaggacagaaaaggagaataaggaacttgaaaatttggagatcaatctgaggaaagagatcgcgaaagcctttaaaggcaacgaaggatacaaaagtctgttcaagaaggatataattgagacaattttgccagagttcctcgatgacaaggacgagattgcgctggtcaattcgttcaacggattcacaacagcattcacaggcttctttgataatcgggaaaatatgttctctgaggaggcaaagtccacttctattgcgttcaggtgtatcaatgagaatctcactaggtacatttccaacatggatatctttgagaaggttgacgcaatttttgacaagcacgaagttcaggagattaaggagaagatcctcaattccgattatgacgttgaggacttcttcgagggtgagttttttaatttcgtgctcactcaagagggtatcgacgtgtataatgcgatcatcggtgggttcgtgactgagtccggtgaaaagattaagggattgaacgagtatatcaacctttacaaccaaaagacgaaacagaagctgccaaagttcaagcctctttacaaacaggttctttcagaccgcgagtcactctcgttctatggggagggctacacttcggatgaggaagtcctggaggtgttcaggaatactctcaataagaattcggagattttctcttctataaaaaaactggaaaagttgtttaagaattttgacgaatactctagcgccggcatatttgtgaaaaacggcccggccatatcaacgataagtaaagatatcttcggcgaatggaacgtgatcagagacaaatggaacgcggagtatgacgatattcacctgaagaagaaggctgtcgtaacggagaagtacgaggatgatcgcaggaaaagcttcaaaaagatcggaagtttcagcctggaacagttgcaggagtatgctgacgccgatcttagcgtcgtcgagaagttgaaggagataatcatccaaaaggtcgacgagatatataaagtctatggatcaagtgaaaaactgttcgacgccgacttcgttttggagaagtccctgaagaagaacgacgctgttgttgccattatgaaggatctgctcgacagcgtgaagagtttcgagaactatattaaggcttttttcggggaggggaaggagactaacagagatgagtccttctacggagacttcgtcctcgcgtacgatatactccttaaggtagaccacatctacgacgcaatcagaaattacgtgacacaaaagccgtacagcaaggacaagttcaaactctacttccagaacccccagttcatgggcggctgggacaaggacaaggaaacggattacagggctacgatcctgaggtatggttcaaaatactacttggcgattatggacaagaagtacgccaagtgtctccagaagattgacaaagacgatgtcaatggcaattatgagaagatcaactacaagctgcttccgggtccgaacaagatgctcccaaaggttttcttcagcaagaaatggatggcctactataacccaagcgaggacatccagaagatttataagaacggtacgttcaagaagggcgacatgttcaatcttaacgactgtcacaagctgatcgacttcttcaaagactcaattagccggtacccaaagtggtctaacgcctatgacttcaacttttcggaaaccgagaagtacaaggatatagccggattttatagagaggtggaagagcagggctacaaggtgtcattcgagtccgccagcaagaaggaagtggacaagctcgtggaagagggtaagctctacatgttccagatttataataaagactttagcgataagagccacgggacacctaatctccacacaatgtatttcaagctgctcttcgacgagaataaccacggccaaatcaggttgtcaggaggggctgaactcttcatgcggcgcgctagccttaagaaggaggagcttgtagtccaccctgcgaatagtccaattgcgaataagaacccggacaatcctaaaaagactacaacattgagctacgacgtgtacaaggataagaggttttccgaggatcagtacgagctccacatcccgattgcgatcaacaagtgcccaaagaatattttcaagataaacacagaggtgcgtgtactcctgaagcatgacgacaatccttacgtcattgggattgatcggggcgagaggaacctcctctatattgtggtggtggacgggaaggggaacatagtcgaacagtactcccttaacgaaataattaacaatttcaacggcatccgtatcaagaccgactaccattcgttgctggacaagaaggagaaggagagatttgaggcgcggcaaaattggacaagtatcgagaacatcaaggaactcaaagcaggttatatctctcaagttgtgcataagatatgcgagctggttgagaagtatgacgcagtgatcgctcttgaggacctcaactcgggctttaagaattctagagttaaagtggagaagcaggtctatcaaaagttcgagaagatgcttatagataagctcaactacatggtcgataagaaatcgaacccatgtgccaccggcggcgcactcaaaggttaccaaataacaaacaaattcgagtccttcaaatcgatgagtactcagaatgggttcatattttatataccggcgtggcttacgtctaagatcgacccgtcaactggttttgtcaacctgttgaagacgaaatacacgtccattgccgattcaaaaaagttcatatctagttttgatcgtattatgtacgtcccagaggaagatcttttcgagtttgctctcgactacaaaaacttttcgcgcaccgatgcggattacattaaaaaatggaaactctattcgtacggcaacagaatcaggatttttcgcaaccctaagaagaataacgtctttgattgggaggaagtttgcttgactagcgcgtacaaggagctctttaataagtatggcattaactaccaacagggtgatatcagagcactgctttgcgaacaatctgacaaggctttctactcatccttcatggctttgatgagcctgatgctccagatgagaaattcaattacaggcagaaccgacgtggatttcttgatctccccggttaaaaattctgatggcatcttttacgatagcaggaactatgaagcgcaagagaatgcgattctgccaaaaaatgcagacgccaacggtgcctataacatcgccaggaaagtcctgtgggcgatcggccagttcaaaaaggccgaagacgaaaaattggacaaggtcaaaatcgctatcagcaacaaagagtggctggagtatgctcagacatccgtaaagcataagcgtcctgctgccaccaaaaaggccggacaggctaagaaaaagaagtgattaattaagatcgttcaaacatttggcaataaagtttcttaagattgaatcctgttgccggtcttgcgatgattatcatataatttctgttgaattacgttaagcatgtaataattaacatgtaatgcatgacgttatttatgagatgggtttttatgattagagtcccgcaattatacatttaatacgcgatagaaaacaaaatatagcgcgcaaactaggataaattatcgcgcgcggtgtcatctatgttactagatcttcgaagaattcattatgtggtctaggtaggttctatatataagaaaacttgaaatgttctaaaaaaaaattcaagcccatgcatgattgaagcaaacggtatagcaacggtgttaacctgatctagtgatctcttgcaatccttaacggccacctaccgcaggtagcaaacggcgtccccctcctcgatatctccgcggcgacctctggctttttccgcggaattgcgcggtggggacggattccacgagaccgcgacgcaaccgcctctcgccgctgggccccacaccgctcggtgccgtagcctcacgggactctttctccctcctcccccgttataaattggcttcatcccctccttgcctcatccatccaaatcccagtccccaatcccatcccttcgtaggagaaattcatcgaagctaagcgaatcctcgcgatcctctcaaggtactgcgagttttcgatccccctctcgacccctcgtatgtttgtgtttgtcgtagcgtttgattaggtatgctttccctgtttgtgttcgtcgtagcgtttgattaggtatgctttccctgttcgtgttcatcgtagtgtttgattaggtcgtgtgaggcgatggcctgctcgcgtccttcgatctgtagtcgatttgcgggtcgtggtgtagatctgcgggctgtgatgaagttatttggtgtgatctgctcgcctgattctgcgggttggctcgagtagatatgatggttggaccggttggttcgtttaccgcgctagggttgggctgggatgatgttgcatgcgccgttgcgcgtgatcccgcagcaggacttgcgtttgattgccagatctcgttacgattatgtgatttggtttggactttttagatctgtagcttctgcttatgtgccagatgcgcctactgctcatatgcctgatgataatcataaatggctgtggaactaactagttgattgcggagtcatgtatcagctacaggtgtagggactagctacaggtgtagggacttgcgtctaattgtttggtcctttactcatgttgcaattatgcaatttagtttagattgtttgttccactcatctaggctgtaaaagggacactgcttagattgctgtttaatctttttagtagattatattatattggtaacttattacccctattacatgccatacgtgacttctgctcatgcctgatgataatcatagatcactgtggaattaattagttgattgttgaatcatgtttcatgtacataccacggcacaattgcttagttccttaacaaatgcaaattttactgatccatgtatgatttgcgtggttctctaatgtgaaatactatagctacttgttagtaagaatcaggttcgtatgcttaatgctgtatgtgccttctgctcatgcctgatgataatcatatatcactggaattaattagttgatcgtttaatcatatatcaagtacataccatgccacaatttttagtcacttaacccatgcagattgaactggtccctgcatgttttgctaaattgttctattctgattagaccatatatcatgtatttttttttggtaatggttctcttattttaaatgctatatagttctggtacttgttagaaagatctgcttcatagtttagttgcctatccctcgaattaggatgctgagcagctgatcctatagctttgtttcatgtatcaattcttttgtgttcaacagtcagtttttgttagattcattgtaacttatggtcgcttactcttctggtcctcaatgcttgcaggggatccaaattactgatgagtccgtgaggacgaaacgagtaagctcgtctaatttctactaagtgtagatatgcttgtgcaagctggtggactggccggcatggtcccagcctcctcgctggcgccggctgggcaacatgcttcggcatggcgaatgggacgatcgttcaaacatttggcaataaagtttcttaagattgaatcctgttgccggtcttgcgatgattatcatataatttctgttgaattacgttaagcatgtaataattaacatgtaatgcatgacgttatttatgagatgggtttttatgattagagtcccgcaattatacatttaatacgcgatagaaaacaaaatatagcgcgcaaactaggataaattatcgcgcgcggtgtcatctatgttactagatccggaccgcgcctgcagtgcagcgtgacccggtcgtgcccctctctagagataatgagcattgcatgtctaagttataaaaaattaccacatattttttttgtcacacttgtttgaagtgcagtttatctatctttatacatatatttaaactttactctacgaataatataatctatagtactacaataatatcagtgttttagagaatcatataaatgaacagttagacatggtctaaaggacaattgagtattttgacaacaggactctacagttttatctttttagtgtgcatgtgttctcctttttttttgcaaatagcttcacctatataatacttcatccattttattagtacatccatttagggtttagggttaatggtttttatagactaatttttttagtacatctattttattctattttagcctctaaattaagaaaactaaaactctattttagtttttttatttaataatttagatataaaatagaataaaataaagtgactaaaaattaaacaaataccctttaagaaattaaaaaaactaaggaaacatttttcttgtttcgagtagataatgccagcctgttaaacgccgtcgacgagtctaacggacaccaaccagcgaaccagcagcgtcgcgtcgggccaagcgaagcagacggcacggcatctctgtcgctgcctctggacccctctcgagagttccgctccaccgttggacttgctccgctgtcggcatccagaaattgcgtggcggagcggcagacgtgagccggcacggcaggcggcctcctcctcctctcacggcaccggcagctacgggggattcctttcccaccgctccttcgctttcccttcctcgcccgccgtaataaatagacaccccctccacaccctctttccccaacctcgtgttgttcggagcgcacacacacacaaccagatctcccccaaatccacccgtcggcacctccgcttcaaggtacgccgctcgtcctcccccccccccctctctaccttctctagatcggcgttccggtccatggttagggcccggtagttctacttctgttcatgtttgtgttagatccgtgtttgtgttagatccgtgctgctagcgttcgtacacggatgcgacctgtacgtcagacacgttctgattgctaacttgccagtgtttctctttggggaatcctgggatggctctagccgttccgcagacgggatcgatttcatgattttttttgtttcgttgcatagggtttggtttgcccttttcctttatttcaatatatgccgtgcacttgtttgtcgggtcatcttttcatgcttttttttgtcttggttgtgatgatgtggtctggttgggcggtcgttctagatcggagtagaattctgtttcaaactacctggtggatttattaattttggatctgtatgtgtgtgccatacatattcatagttacgaattgaagatgatggatggaaatatcgatctaggataggtatacatgttgatgcgggttttactgatgcatatacagagatgctttttgttcgcttggttgtgatgatgtggtgtggttgggcggtcgttcattcgttctagatcggagtagaatactgtttcaaactacctggtgtatttattaattttggaactgtatgtgtgtgtcatacatcttcatagttacgagtttaagatggatggaaatatcgatctaggataggtatacatgttgatgtgggttttactgatgcatatacatgatggcatatgcagcatctattcatatgctctaaccttgagtacctatctattataataaacaagtatgttttataattattttgatcttgatatacttggatgatggcatatgcagcagctatatgtggatttttttagccctgccttcatacgctatttatttgcttggtactgtttcttttgtcgatgctcaccctgttgtttggtgttacttctgcagggatccggcagcagccatgcagaagctgatcaacagcgtgcagaactacgcctggggcagcaagaccgccctgaccgagctgtacggcatggagaaccccagcagccagcccatggccgagctgtggatgggcgcccaccccaagagcagcagccgcgtgcagaacgccgccggcgacatcgtgagcctgcgcgacgtgatcgagagcgacaagagcaccctgctgggcgaggccgtggccaagcgcttcggcgagctgcccttcctgttcaaggtgctgtgcgccgcccagcccctgagcatccaggtgcaccccaacaagcacaacagcgagatcggcttcgccaaggagaacgccgccggcatccccatggacgccgccgagcgcaactacaaggaccccaaccacaagcccgagctggtgttcgccctgacccccttcctggccatgaacgccttccgcgagttcagcgagatcgtgagcctgctgcagcccgtggccggcgcccaccccgccatcgcccacttcctgcagcagcccgacgccgagcgcctgagcgagctgttcgccagcctgctgaacatgcagggcgaggagaagagccgcgccctggccatcctgaagagcgccctggacagccagcagggcgagccctggcagaccatccgcctgatcagcgagttctaccccgaggacagcggcctgttcagccccctgctgctgaacgtggtgaagctgaaccccggcgaggccatgttcctgttcgccgagaccccccacgcctacctgcagggcgtggccctggaggtgatggccaacagcgacaacgtgctgcgcgccggcctgacccccaagtacatcgacatccccgagctggtggccaacgtgaagttcgaggccaagcccgccaaccagctgctgacccagcccgtgaagcagggcgccgagctggacttccccatccccgtggacgacttcgccttcagcctgcacgacctgagcgacaaggagaccaccatcagccagcagagcgccgccatcctgttctgcgtggagggcgacgccaccctgtggaagggcagccagcagctgcagctgaagcccggcgagagcgccttcatcgccgccaacgagagccccgtgaccgtgaagggccacggccgcctggcccgcgtgtacaacaagctgtgataggagctcgatccgtcgacctgcagatcgttcaaacatttggcaataaagtttcttaagattgaatcctgttgccggtcttgcgatgattatcatataatttctgttgaattacgttaagcatgtaataattaacatgtaatgcatgacgttatttatgagatgggtttttatgattagagtcccgcaattatacatttaatacgcgatagaaaacaaaatatagcgcgcaaactaggataaattatcgcgcgcggtgtcatctatgttactagatcggcgcgccgcaattgaagtttgggcggccagcatggccgtatccgcaatgtgttattaagttgtctaagcgtcaatttgtttacaccacaatatatcctgccaccagccagccaacagctccccgaccggcagctcggcacaaaatcaccactcgatacaggcagcccatcagaattaattctcatgtttgacagcttatcatcgactgcacggtgcaccaatgcttctggcgtcaggcagccatcggaagctgtggtatggctgtgcaggtcgtaaatcactgcataattcgtgtcgctcaaggcgcactcccgttctggataatgttttttgcgccgacatcataacggttctggcaaatattctgaaatgagctgttgacaattaatcatccggctcgtataatgtgtggaattgtgagcggataacaatttcacacaggaaacagaccatgagggaagcgttgatcgccgaagtatcgactcaactatcagaggtagttggcgtcatcgagcgccatctcgaaccgacgttgctggccgtacatttgtacggctccgcagtggatggcggcctgaagccacacagtgatattgatttgctggttacggtgaccgtaaggcttgatgaaacaacgcggcgagctttgatcaacgaccttttggaaacttcggcttcccctggagagagcgagattctccgcgctgtagaagtcaccattgttgtgcacgacgacatcattccgtggcgttatccagctaagcgcgaactgcaatttggagaatggcagcgcaatgacattcttgcaggtatcttcgagccagccacgatcgacattgatctggctatcttgctgacaaaagcaagagaacatagcgttgccttggtaggtccagcggcggaggaactctttgatccggttcctgaacaggatctatttgaggcgctaaatgaaaccttaacgctatggaactcgccgcccgactgggctggcgatgagcgaaatgtagtgcttacgttgtcccgcatttggtacagcgcagtaaccggcaaaatcgcgccgaaggatgtcgctgccgactgggcaatggagcgcctgccggcccagtatcagcccgtcatacttgaagctaggcaggcttatcttggacaagaagatcgcttggcctcgcgcgcagatcagttggaagaatttgttcactacgtgaaaggcgagatcaccaaagtagtcggcaaataaagctctagtggatctccgtacccggggatctggctcgcggcggacgcacgacgccggggcgagaccataggcgatctcctaaatcaatagtagctgtaacctcgaagcgtttcacttgtaacaacgattgagaatttttgtcataaaattgaaatacttggttcgcatttttgtcatccgcggtcagccgcaattctgacgaactgcccatttagctggagatgattgtacatccttcacgtgaaaatttctcaagcgctgtgaacaagggttcagattttagattgaaaggtgagccgttgaaacacgttcttcttgtcgatgacgacgtcgctatgcggcatcttattattgaataccttacgatccacgccttcaaagtgaccgcggtagccgacagcacccagttcacaagagtactctcttccgcgacggtcgatgtcgtggttgttgatctagatttaggtcgtgaagatgggctcgagctaggagcaagtgattttatcgctaagccgttcagtatcagagagtttctagcacgcattcgggttgccttgcgcgtgcgccccaacgttgtccgctccaaagaccgacggtctttttgttttactgactggacacttaatctcaggcaacgtcgcttgatgtccgaagctggcggtgaggtgaaacttacggcaggtgagttcaatcttctcctcgcgtttttagagaaaccccgcgacgttctatcgcgcgagcaacttctcattgccagtcgagtacgcgacgaggaggtttatgacaggagtatagatgttctcattttgaggctgcgccgcaaacttgaggcagatccgtcaagccctcaactgataaaaacagcaagaggtgccggttatttctttgacgcggacgtgcaggtttcgcacggggggacgatggcagcctgagccaattcccagatccccgaggaatcggcgtgagcggtcgcaaaccatccggcccggtacaaatcggcgcggcgctgggtgatgacctggtggagaagttgaaggccgcgcaggccgcccagcggcaacgcatcgaggcagaagcacgccccggtgaatcgtggcaagcggccgctgatcgaatccgcaaagaatcccggcaaccgccggcagccggtgcgccgtcgattaggaagccgcccaagggcgacgagcaaccagattttttcgttccgatgctctatgacgtgggcacccgcgatagtcgcagcatcatggacgtggccgttttccgtctgtcgaagcgtgaccgacgagctggcgaggtgatccgctacgagcttccagacgggcacgtagaggtttccgcagggccggccggcatggccagtgtgtgggattacgacctggtactgatggcggtttcccatctaaccgaatccatgaaccgataccgggaagggaagggagacaagcccggccgcgtgttccgtccacacgttgcggacgtactcaagttctgccggcgagccgatggcggaaagcagaaagacgacctggtagaaacctgcattcggttaaacaccacgcacgttgccatgcagcgtacgaagaaggccaagaacggccgcctggtgacggtatccgagggtgaagccttgattagccgctacaagatcgtaaagagcgaaaccgggcggccggagtacatcgagatcgagctagctgattggatgtaccgcgagatcacagaaggcaagaacccggacgtgctgacggttcaccccgattactttttgatcgatcccggcatcggccgttttctctaccgcctggcacgccgcgccgcaggcaaggcagaagccagatggttgttcaagacgatctacgaacgcagtggcagcgccggagagttcaagaagttctgtttcaccgtgcgcaagctgatcgggtcaaatgacctgccggagtacgatttgaaggaggaggcggggcaggctggcccgatcctagtcatgcgctaccgcaacctgatcgagggcgaagcatccgccggttcctaatgtacggagcagatgctagggcaaattgccctagcaggggaaaaaggtcgaaaaggtctctttcctgtggatagcacgtacattgggaacccaaagccgtacattgggaaccggaacccgtacattgggaacccaaagccgtacattgggaaccggtcacacatgtaagtgactgatataaaagagaaaaaaggcgatttttccgcctaaaactctttaaaacttattaaaactcttaaaacccgcctggcctgtgcataactgtctggccagcgcacagccgaagagctgcaaaaagcgcctacccttcggtcgctgcgctccctacgccccgccgcttcgcgtcggcctatcgcggccgctggccgctcaaaaatggctggcctacggccaggcaatctaccagggcgcggacaagccgcgccgtcgccactcgaccgccggcgctgaggtctgcctcgtgaagaaggtgttgctgactcataccaggcctgaatcgccccatcatccagccagaaagtgagggagccacggttgatgagagctttgttgtaggtggaccagttggtgattttgaacttttgctttgccacggaacggtctgcgttgtcgggaagatgcgtgatctgatccttcaactcagcaaaagttcgatttattcaacaaagccgccgtcccgtcaagtcagcgtaatgctctgccagtgttacaaccaattaaccaattctgattagaaaaactcatcgagcatcaaatgaaactgcaatttattcatatcaggattatcaataccatatttttgaaaaagccgtttctgtaatgaaggagaaaactcaccgaggcagttccataggatggcaagatcctggtatcggtctgcgattccgactcgtccaacatcaatacaacctattaatttcccctcgtcaaaaataaggttatcaagtgagaaatcaccatgagtgacgactgaatccggtgagaatggcaaaagctctgcattaatgaatcggccaacgcgcggggagaggcggtttgcgtattgggcgctcttccgcttcctcgctcactgactcgctgcgctcggtcgttcggctgcggcgagcggtatcagctcactcaaaggcggtaatacggttatccacagaatcaggggataacgcaggaaagaacatgtgagcaaaaggccagcaaaaggccaggaaccgtaaaaaggccgcgttgctggcgtttttccataggctccgcccccctgacgagcatcacaaaaatcgacgctcaagtcagaggtggcgaaacccgacaggactataaagataccaggcgtttccccctggaagctccctcgtgcgctctcctgttccgaccctgccgcttaccggatacctgtccgcctttctcccttcgggaagcgtggcgctttctcatagctcacgctgtaggtatctcagttcggtgtaggtcgttcgctccaagctgggctgtgtgcacgaaccccccgttcagcccgaccgctgcgccttatccggtaactatcgtcttgagtccaacccggtaagacacgacttatcgccactggcagcagccactggtaacaggattagcagagcgaggtatgtaggcggtgctacagagttcttgaagtggtggcctaactacggctacactagaagaacagtatttggtatctgcgctctgctgaagccagttaccttcggaaaaagagttggtagctcttgatccggcaaacaaaccaccgctggtagcggtggtttttttgtttgcaagcagcagattacgcgcagaaaaaaaggatctcaagaagatcctttgatcttttctacggggtctgacgctcagtggaacgaaaactcacgttaagggattttggtcatgagattatcaaaaaggatcttcacctagatccttttgatccggacaaacaaacaaatacagtaatttagccaggacgtcggccgaaagagcgacaagcagatcacgcttttcgacagcgtcggatttgcgatcgaggatttttcggcgctgcgctacgtccgcgaccgcgttgagggatcaagccacagcagcccactcgaccttctagccgacccagacgagccaagggatctttttggaatgctgctccgtcgtcaggctttccgacgtttgggtggttgaacagaagtcattatcgcacggaatgccaagcactcccgagggg

SEQ ID NO: 315 - DNA, 127 bp, Glycine max
  source 1..127: mol_type = genomic DNA; note = DONOR SEQUENCE FOR SOY BIODA C371D
atcttgtgaattttttttaggttcagaagacagaagtcatagcaccacaattcgatgcagatgctagctggtggactcaaggacccgatgctataatgcaggtcatcctcattttaagctattaact

SEQ ID NO: 316 - DNA, 127 bp, Oryza sativa
  source 1..127: mol_type = genomic DNA; note = DONOR SEQUENCE FOR RICE BIODA C371D
tgttgctcattcttttggtgcaggttaaagacaaaacgattgttccccagttcgatgcagatgctagttggtggacacaaggacctgattctaacttacaggttattgtctacacatcttccatcat

SEQ ID NO: 317 - DNA, 127 bp, Helianthus annuus
  source 1..127: mol_type = genomic DNA; note = DONOR SEQUENCE FOR SUNFLOWER BIODA C384D
gaagtctgattcgtgtacaggtgaaggatcatgattatattactcaaatgttcgatgctgatgcaagctggtggactcagggccctaatgctgctttacaggtcattctgattttgtgtatcgttga

SEQ ID NO: 318 - protein, 833 aa, synthetic construct
  source 1..833: note = Arabidopsis thaliana BioDA protein P421G (SEQ ID NO:318)
MIPVTATLIRHRLRHLRHRIRFKSTSVSPFHLPLNHPTYLIWSANTSLGKTLVSTGIAASFLLQQPSSSATKLLYLKPIQTGFPSDSDSRFVFSKLDSLSLRRQIPISISNSVLHSSLPAAKSLGLNVEVSESGMCSLNFRDEKTVTGAPELLCKTLYAWEAAISPHLAAERENATVEDSVVLQMIEKCLKEEMECGVKSEKSDLLCLVETAGGVASPGPSGTLQCDLYRPFRLPGILVGDGRLGGISGTIAAYESLKLRGYDIAAVVFEDHGLVNEVPLTSYLRNKVPVLVLPPVPKDPSDDLIEWFVESDGVFKALKETMVLANLERLERLNGMAKLAGEVFWWPFTQHKLVHQETVTVIDSRCGENFSIYKASDNSSLSQQFDACASWWTQGPDPTFQAELAREMGYTAARFGHVMFGENVYEPALKCAELLLDGVGKGWASRVYFSDNGSTAIEIALKMAFRKFCVDHNFCEATEEEKHIVVKVIALRGSYHGDTLGAMEAQAPSPYTGFLQQPWYTGRGLFLDPPTVFLSNGSWNISLPESFSEIAPEYGTFTSRDEIFDKSRDASTLARIYSAYLSKHLQEHSGVRQSAHVGALIIEPVIHGAGGMHMVDPLFQRVLVNECRNRKIPVIFDEVFTGFWRLGVETTTELLGCKPDIACFAKLLTGGMVPLAVTLATDAVFDSFSGDSKLKALLHGHSYSAHAMGCATAAKAIQWFKDPETNHNITSQGKTLRELWDEELVQQISSHSAVQRVVVIGTLFALELKADASNSGYASLYAKSLLIMLREDGIFTRPLGNVIYLMCGPCTSPEICRRLLTKLYKRLGEFNRT

SEQ ID NO: 319 - protein, 837 aa, Selaginella moellendorffii
  source 1..837: note = Selaginella moellendorffii BioDA (SEQ ID NO: 319)
MLLLALWRRLGRRSSAAGHVRCFSSAQALPSAEDFAARRREDALLGEIDARYPAFMVWGCNTDVGKTLVSTGMAAALLSPGKSQKSHVLYVKPVQTGFPDDSDARSVTQRIDSLVGRSESIFLSNRTMWLSDEASKKAALTKRSTDSSGSWKNSANSVKSSSSLTCETLWSWCAAVSPHLAAQQEGGGASDDELRKVLRSSLWEFGAGASQTGRSWAFVETAGGVASPAPSGTLQCDLYRPLRLPGILVGDGRLGGISTTLAAYESLLLRGYETICIVIQDMGLGNNQHLSKQLHNRVPVFVIPAVPKNPGDDLAGWFHDTSSTFVQVVSLLEDAYHKRIQRLREMPKKASELLWWPFTQHRLVPEENVTVIDSRSGEFFSVYENKHGRFAQQFDACASWWTQGPDASLQHELAKQIAYAAGRYGHVMFPENVHEPGLRCAELLLQGVGRGWAHRVYISDNGSTATEIALKMALRKYAVDHGFLTNQGDKKPDFKVLALRGSYHGDTLGAMEAQAPSPYTGFSQQPWYSGRGVFLDPPTVCCQNRKWQLRVPERYGTIATELAWDAREDVFALGRDNTELAKIYSSAIEKEIMSSQGSLGGQTIAGLIIEPIIHAAGGMELVDPLFQRILTQQCKCHKIPVIFDEVFTGCWRLGAESAWELLGCKPDIACYAKLLTGGTVPLAATLATQDIFQAFEGASKLDALLHGHSYTAHPVGCSAAVTALEWFKDPSKNPNLLPGTSRLQEQWDPELVAEISSRSSVERVISLGTLMALELRSTSSSQKGYSSLLSSGVVKELRQELGIYTRPLGNVVYFMCGPLTKPSVCSSLLRRMLKVLE

SEQ ID NO: 320 - protein, 815 aa, synthetic construct
  source 1..815: note = Selaginella moellendorcffii BioDA delta MTP (SEQ ID NO: 320)
MSSAQALPSAEDFAARRREDALLGEIDARYPAFMVWGCNTDVGKTLVSTGMAAALLSPGKSQKSHVLYVKPVQTGFPDDSDARSVTQRIDSLVGRSESIFLSNRTMWLSDEASKKAALTKRSTDSSGSWKNSANSVKSSSSLTCETLWSWCAAVSPHLAAQQEGGGASDDELRKVLRSSLWEFGAGASQTGRSWAFVETAGGVASPAPSGTLQCDLYRPLRLPGILVGDGRLGGISTTLAAYESLLLRGYETICIVIQDMGLGNNQHLSKQLHNRVPVFVIPAVPKNPGDDLAGWFHDTSSTFVQVVSLLEDAYHKRIQRLREMPKKASELLWWPFTQHRLVPEENVTVIDSRSGEFFSVYENKHGRFAQQFDACASWWTQGPDASLQHELAKQIAYAAGRYGHVMFPENVHEPGLRCAELLLQGVGRGWAHRVYISDNGSTATEIALKMALRKYAVDHGFLTNQGDKKPDFKVLALRGSYHGDTLGAMEAQAPSPYTGFSQQPWYSGRGVFLDPPTVCCQNRKWQLRVPERYGTIATELAWDAREDVFALGRDNTELAKIYSSAIEKEIMSSQGSLGGQTIAGLIIEPIIHAAGGMELVDPLFQRILTQQCKCHKIPVIFDEVFTGCWRLGAESAWELLGCKPDIACYAKLLTGGTVPLAATLATQDIFQAFEGASKLDALLHGHSYTAHPVGCSAAVTALEWFKDPSKNPNLLPGTSRLQEQWDPELVAEISSRSSVERVISLGTLMALELRSTSSSQKGYSSLLSSGVVKELRQELGIYTRPLGNVVYFMCGPLTKPSVCSSLLRRMLKVLE

SEQ ID NO: 321 - protein, 815 aa, synthetic construct
  source 1..815: note = Ostreococcus tauri ATCC 22665 BioDA delta MTP A374D (SEQ ID NO:321)
MLGSASDGAASGNGRALELSIASFAIWGANTGVGKTLASAGLARAATRRGTATTFLKPVQTGYPEDSDAGFVARQTKGNETAGEHAAVASGSTEGGGEGFAAGVTRAHTEFAWRRAAGPHLTAAEEGRPVSDEEIVRATRNYLREFAESAREGNARGFAVIETAGGVASPGPSGTLQCEILRALRLPAILIGDGRLGGISTTTSAYESLHARGYDVVGVLMADDGYANHEAVAKILPSGTKVFALPPLPPQGKADAWLEKSAGVFSEAFETAMNWHEKRIQALQKLPGEALEKIWWPFTQHATVEPDTVTVIDGRYGEDFEIYDQEKGRDGAIDLRFDGDASWWTQGVSAELQQELNSAAANAAGRYGHVMFPENVHQPSMDATNALLEGPGKGWGSRVFYSDNGSTATEVGLKMAFRKYYVDAGLVSKDGHQRAKDLINDGSCHLPQLRIIALDGSYHGDTLGAMDMQSPSVFTGPMQTPWYQPRGLFLQPPSLAIRNGEWTVALPPHGLLNDGEDRLFHDGKDLESNTTWKSKADAFDIGKRLDSPLANEYRQAVDKALERAEQDAKAGHMGPVGALMMEPVLHGAGGMVLIDPLFQNILMKVCRERKIPIVLDEVFAGIWRLGTEGAWEIIGEKPDISCYAKLLTGGLMPMSATVATADVFDVFYGPGKAQGLLHGHSYTAYPIGCAVASKALSLYKDPAKNPNLIVDASSKGDTPTAYLRELWDESKLKEISNKSSVRRVFGQGCVLAVELEVEGEGGYSSNAAKEVVLRLRPHSVQARPLGNVVYLMCAPTTPKATCDRLLNVLAEELSE

SEQ ID NO: 322 - protein, 815 aa, synthetic construct
  source 1..815: note = Ostreococcus tauri ATCC 22665 BioDA delta MTP F332A (SEQ ID NO:322)
MLGSASDGAASGNGRALELSIASFAIWGANTGVGKTLASAGLARAATRRGTATTFLKPVQTGYPEDSDAGFVARQTKGNETAGEHAAVASGSTEGGGEGFAAGVTRAHTEFAWRRAAGPHLTAAEEGRPVSDEEIVRATRNYLREFAESAREGNARGFAVIETAGGVASPGPSGTLQCEILRALRLPAILIGDGRLGGISTTTSAYESLHARGYDVVGVLMADDGYANHEAVAKILPSGTKVFALPPLPPQGKADAWLEKSAGVFSEAFETAMNWHEKRIQALQKLPGEALEKIWWPATQHATVEPDTVTVIDGRYGEDFEIYDQEKGRDGAIDLRFDGAASWWTQGVSAELQQELNSAAANAAGRYGHVMFPENVHQPSMDATNALLEGPGKGWGSRVFYSDNGSTATEVGLKMAFRKYYVDAGLVSKDGHQRAKDLINDGSCHLPQLRIIALDGSYHGDTLGAMDMQSPSVFTGPMQTPWYQPRGLFLQPPSLAIRNGEWTVALPPHGLLNDGEDRLFHDGKDLESNTTWKSKADAFDIGKRLDSPLANEYRQAVDKALERAEQDAKAGHMGPVGALMMEPVLHGAGGMVLIDPLFQNILMKVCRERKIPIVLDEVFAGIWRLGTEGAWEIIGEKPDISCYAKLLTGGLMPMSATVATADVFDVFYGPGKAQGLLHGHSYTAYPIGCAVASKALSLYKDPAKNPNLIVDASSKGDTPTAYLRELWDESKLKEISNKSSVRRVFGQGCVLAVELEVEGEGGYSSNAAKEVVLRLRPHSVQARPLGNVVYLMCAPTTPKATCDRLLNVLAEELSE

SEQ ID NO: 323 - protein, 815 aa, synthetic construct
  source 1..815: note = Ostreococcus tauri ATCC 22665 BioDAdeltaMTP P407A (SEQ ID NO:323)
MLGSASDGAASGNGRALELSIASFAIWGANTGVGKTLASAGLARAATRRGTATTFLKPVQTGYPEDSDAGFVARQTKGNETAGEHAAVASGSTEGGGEGFAAGVTRAHTEFAWRRAAGPHLTAAEEGRPVSDEEIVRATRNYLREFAESAREGNARGFAVIETAGGVASPGPSGTLQCEILRALRLPAILIGDGRLGGISTTTSAYESLHARGYDVVGVLMADDGYANHEAVAKILPSGTKVFALPPLPPQGKADAWLEKSAGVFSEAFETAMNWHEKRIQALQKLPGEALEKIWWPFTQHATVEPDTVTVIDGRYGEDFEIYDQEKGRDGAIDLRFDGAASWWTQGVSAELQQELNSAAANAAGRYGHVMFAENVHQPSMDATNALLEGPGKGWGSRVFYSDNGSTATEVGLKMAFRKYYVDAGLVSKDGHQRAKDLINDGSCHLPQLRIIALDGSYHGDTLGAMDMQSPSVFTGPMQTPWYQPRGLFLQPPSLAIRNGEWTVALPPHGLLNDGEDRLFHDGKDLESNTTWKSKADAFDIGKRLDSPLANEYRQAVDKALERAEQDAKAGHMGPVGALMMEPVLHGAGGMVLIDPLFQNILMKVCRERKIPIVLDEVFAGIWRLGTEGAWEIIGEKPDISCYAKLLTGGLMPMSATVATADVFDVFYGPGKAQGLLHGHSYTAYPIGCAVASKALSLYKDPAKNPNLIVDASSKGDTPTAYLRELWDESKLKEISNKSSVRRVFGQGCVLAVELEVEGEGGYSSNAAKEVVLRLRPHSVQARPLGNVVYLMCAPTTPKATCDRLLNVLAEELSE

SEQ ID NO: 324 - protein, 819 aa, synthetic construct
  source 1..819: note = Zea mays BioDA C372D amino acid (SEQ ID NO: 324)
MVRRLFLHHARRRLHSGTASSIPLSTPIFAIFGANTGVGKTLVSAGLATALLSSPSPAVSSVAYLKPLQTGYPVDSDASFVFSRTPALLRAFPPCRATRLIASCRTFFQSPAVEAKAESLHESQEKVVTYGAGAAEQTKVLACCTAYAWREPVSPHLAAEREGMAAGDDEVKGCVEQWLLEEGIGEGGEVWKILETAGGVASPSASGTLQCDLYRPFRLPAILVGDGRLGGISSTLSAYETLLLRGYDVSAVILEDRELSNDKFLLSYLRNRVHVLILPQIPEDPLDDLTDWFSESSSIFIFLKDELQSFHSRRIERLNSMQRKSKALLWWPFTQHNLVPQDSVTVIDSRYGENFSVYKIKDKMLIPQFDADASWWTQGPDSNLQIELARDMGYAAARYGHVMFPENVHEPALHSAEVLLGGVGKGWASRVYYSDNGSTAIEIALKMAFRKFSLDHGIMASSENSTRNERNIQLKVLALNGSYHGDTLGAMEAQAPSAYTSFLQQPWYSGRGLFLDPPTVYIKSEVYNISLPQSMQHDPQTYGFFSQAEVFCKTRDKTFAADLYSSYIKQKLSEFSLSSSSEHLAALIIEPVIQGAGGMLMIDPLFQRVLVSECRSRKIPVIFDEVFTGFWRLGVESASELLGCLPDIACYAKLMTGGIIPLAATLATEEVFESFESDSKLTALLHGHSYTAHAMGCTAALKAMQWYRGPSTNSNLDTDHMKLKELWDGTLVKQLSSLPNVKRVVSLGTLCAIELKAEGADAGYASLYASSLVQQLRKEDDIYIRPLGNVIYLMCGPCTPRDSCTRQLLKVHRRLCALN

SEQ ID NO: 325 - protein, 470 aa, synthetic construct
  source 1..470: note = Pantoea ananatis BioDA with MTP (SEQ ID NO: 325)
MSVSCCCRNLGKTIKKAIPSHHLHLRSLGGSLYRRIQSSSMFTSQDAEFDRQHIWHPYTSMQQPLPCYPVVAAKDYHLQLADGRTLVDGMSSWWAAIHGYNHPRLNRALQQQMGQMSHVMFGGITHPAAVALCRQLVSMTPDALECVFLADSGSVAVEVAMKMALQYWLGRGETRQQFLTLKRGYHGDTFAAMSVCDPDNSMHSLWRGYLPEHHFAAAPQCGFDDEWDARDAEDFIRLIQQHRGQLAAVILEPIVQGAGGMRFYHPRYLQCVREACDRHGILLIADEIATGFGRTGTLFACEHAAISPDIMCVGKALTGGTMSLAATLTTRDVADTISLSPAGCFMHGPTFMGNPLACAVASESLAMVQEGDWRQQVAAIERQLRGALLPLRHAPAVADVRVLGAIGVVETHQPVNMAALQQFFVSQGVWIRPFGRLIYLMPPYIISPEALDKLVNAIGAALEQPAHFLS

SEQ ID NO: 326 - protein, 503 aa, synthetic construct
  source 1..503: note = Stenotrophomonas maltophilia BioDA with MTP (SEQ ID NO: 326)
MSVSCCCRNLGKTIKKAIPSHHLHLRSLGGSLYRRIQSSSMLADPTPSPLAHHWRQRDLQVLWHPCTQMREHPDTLPLVPIARGEGAWLIDHDGNRYLDAVSSWWTNLFGHAEPRIGGAIAAQATQLEQVMLAGFGHEPAITLAERLLALAPRQPGREPLAKVFYADNGSAGVEVALKMAFQYFQNRGESRRTRFIALENGYHGETLGALALGDIPLYRRVYAPLLAEALFAPSPDAYLAEPGQSAADRARQAADGLATLFDQHPGEICAVILEPRLQCAGGMRMHDPVYLQRVRELCDAHGAFMIADEIATGFGRTGTLFACEQAGVMPDLMCLSKGLTGGFLPLAAVLATQALYDAFLDDSRERAFLHSHSYTGNPLACAAALTTLDIFRDDDVIARNRSIASVMGTLAAPFNDHPHVADVRQAGMVVAFELSRDGNKRTPFDPAMRLGLHAYKAALKRGVVLRPLGDVLYWMPPYCVDDEQLELLAHTTLAAIDEAIACA

SEQ ID NO: 327 - protein, 473 aa, synthetic construct
  source 1..473: note = Chroococcidiopsis sp. CCMEE 29 BioDA with MTP (SEQ ID NO: 327)
MSVSCCCRNLGKTIKKAIPSHHLHLRSLGGSLYRRIQSSSMSVEEIHPSYPIWHPSTQMKTSPPPLKVVKGQGVMLELEDGRQILDCISSWWVTIHGHSHPILANALYQQAQQLEHVIFAGFTHEPAEQLARKLLNHLPKSLTRVFFSDNGSTAVEVALKMAYQYWYNQGETQRTSFIGFEGGYHGDTLGAMSVGGSTSWWQTFQLLMFSIDVVPFPATFDRDPNVEAHEAQSLETITRLLKQNPDRYAGIFIEPLVQGAAGMRLCRPQFLQELESLARSFDVLLIYDEVMTGFGRTGEFFACLKSATTPDILCLSKGLSGGCLPLAVTLATEDIYRAFYSDDIHKAFLHGHSYTGNPLACATGVASLELLEQNPEFRAIEHQHRYYLEKWLIGHPKVEQLRTCGTIAAMEVRTEDQSSYFNAIGPTLRSRFLEEGFLLRPLGNTIYIMPPYCITPNQLESIYQAIRRVLDTL

SEQ ID NO: 328 - protein, 488 aa, synthetic construct
  source 1..488: note = Bacillus subtilis BioDA with MTP (SEQ ID NO: 328)
MSVSCCCRNLGKTIKKAIPSHHLHLRSLGGSLYRRIQSSSMKQSMIEKSKKHLWLPFTQMKDYDEDPLIIESGNGIMLKDISGKEYYDGFSSVWLNVHGHRKKEMDEAIQKQLEKIAHSTLLGMTNVPATELAEMLTGITPEKLTRVFYSDSGAEAMEIALKMAFQYWKNIGRPEKQTFISMQNGYHGDTIGAVSVGSIELFHHVYGPLMFESYKAPIPYVYRSESGDPVQCRDECLHALEQLLAKHHEEIAALTIESMVQGASGMIVMPEGFLAGVRKLCTAYDVLMIVDEVATGFGRTGKMFACEHENVQPDLMAAGKGITGGYLPIAVTFATEAIYEAFYDDYDKMKTFFHGHSYTGNQLGCAAAIENLRLFESERIVEQVAEKSKTAAEFLHDLKQLSHVGDVRQLGFMCGIELVQDKGTKQPYPPEKRMGYKVSLKMRELGMLTRPLGDVIAFLPPLASTTDQLQAMISIMKEAIAEVTGRGF

SEQ ID NO: 329 - protein, 466 aa, synthetic construct
  source 1..466: note = Streptomyces viridochromogenes BioDA with MTP (SEQ ID NO: 329)
MSVSCCCRNLGKTIKKAIPSHHLHLRSLGGSLYRRIQSSSMPDLSVPELLALDRRHVWHPYGPMPGRIDPLVVESASGVRLKLAGGSGELVDGMSSWWSAIHGYNHPVLNEAAHEQLSRMSHVMFGGLTHEPAVRLAKLLVDMSPDGLEHVFLADSGSVSVEVAVKMCLQYWRSLGRPGKQRLLTWRGGYHGDTWQPMSVCDPEGGMHELWTGVLQRQVFADPPPAVYDESYSDHLRSLIERHAHELAAVIVEPVVQGAGGMRFHSPAYLRVLREACDAHDVLLVFDEIATGFGRTGALFAADHAAVTPDVMCMGKALTGGYLTLAATVCTSRVADGISRGEVPVLAHGPTFMGNPLAAAVACASIELLLGQDWLAEVKRIEAGLREGLAPVADLPGVRDVRVLGAIGVVQLDHAVDMKAATDAAVREGVWLRPFRDLIYTMPPYVTGDADLARIARAVCAAAREG

SEQ ID NO: 330 - protein, 461 aa, synthetic construct
  source 1..461: note = Pedobacter hartonius BioDA with MTP (SEQ ID NO: 330)
MSVSCCCRNLGKTIKKAIPSHHLHLRSLGGSLYRRIQSSSMTLTQRDAESIWHPYTQQLNARPPLPVLSGKGAYLYDEEGCRYIDAVSSWWVTLHGHSHPYIVERVTAQLQQLDQVIFAGFTHEPAIALAENLLAILPEGQKKVFYTDNGSTAVEVALKMCVQYWFNKGKSRKKVLAFNNGYHGDTFGAMSVSGRSAWTAPFDNLLFEVIFIDTPTEENLPVLKEIISVHAAELACFVYEPLVQGSAGMLMYEAPALDQLMAHCLEEGVLMIQDEVFTGFGRTGKNFAADHLKTQPDVMCFSKGLTGGTMPLGVTTCTEDIYNAFLSEDKLKTLFHGHSFTANPLACTAALASIELLLQHEAQDNIRRICNRHAEFSLKICGHQKVAAVRQTGTIIAIEWQTESGTSYFSKLRNLLYDYFMDKGILMRPLGNVIYILPPYCISDEDLKKIYQEIQNALEIF

SEQ ID NO: 331 - protein, 456 aa, synthetic construct
  source 1..456: note = Chitinophaga filiformis BioDA with MTP (SEQ ID NO: 331)
MSVSCCCRNLGKTIKKAIPSHHLHLRSLGGSLYRRIQSSSMLWYPYTQMRQINELPKMVSGEGVMMHLEDGRSLIDGISSWWAVIHGYNHPALNAALLTQANKFAHVMLGGMTHNPALDLAAKLVSITPQGLNHVFFSDSGSIGVEVALKMSIQYWKNIGYNGKSKIISLRNGYHGDTFKAMEVSDDSDFTRAFSDVLRRGYILDIPEGGFDADAALVKQATDKLEALLRREHHNIAAFIVEPIVQCAGGFNIYSPLYLKAARELCTKYNVLFVFDEVATGFGRTGKLFAAEHAGVTPDIMILGKALTAGYMGHAATLATSAVFDSFLGDNYEKALMHGPTFMANPLACAVALRSISIIEDEQYLQKIAKIQSIIREQFDTFSSPAIVAKRSIGAIGALEMKDAACLSGFKEFSQQRGVWLRPIGNVLYLMPPYIISEKELLTILQVIKDWIQQIK

SEQ ID NO: 332 - protein, 461 aa, synthetic construct
  source 1..461: note = Tenacibaculum adriaticum BioDA with MTP (SEQ ID NO: 332)
MSVSCCCRNLGKTIKKAIPSHHLHLRSLGGSLYRRIQSSSMNLTERDKKHLWHPLTQHQLYPNHLAITKAKGAILYDDKNNEYIDGIASWYTCMYGHCNEYITSSVYKQMQQLDHVVFAGFTHEPAIKLSEELIKILPENQEKVFFSDNGSTSVDVAIKMALQYHFNQGEKKGKIIALEDGFHGDTFGAMSVSGLSVYNGPFEDFFIDVARIPVPTQENFEHVKEEFIKLITEHNVAAFVYEPLVQGAAAMKMFDGNLLNELIKIAQENNVLAIADEVMTGFGKTGKNFASEYLEHKPDIICLSKSLTAGLVPMAITSCSQKVYNAFLSDDIGKGFFHGHTYSANPVACSAALAGIELLQSEEIQGNIQRIIKSHQEFDSKIKKHPKVKSTRQKGIIYALDLNVEMERYGDLRYKLFNFFMENGVCLRPLGNTIYILAPFVITNEQLEKIYKTIEKALEIL

SEQ ID NO: 333 - DNA, 1413 bp, synthetic construct
  source 1..1413: mol_type = other DNA; note = Pantoea ananatis BioA nucleic acid  with MTP (SEQ ID NO:333)
atgagcgttagctgttgttgccgtaatttgggtaaaactattaagaaagcaattccctctcatcacctacaccttaggtctttgggtgggtctttgtaccggcgaattcagagctctagcatgtttacttcacaggacgctgaatttgatagacagcatatttggcacccttacacgtccatgcaacagccattgccttgctatccagtggttgctgctaaagactaccacctacaactggctgatggacggacattggttgatgggatgtcatcatggtgggctgctattcacggatataatcatcccagacttaatcgggccctgcaacaacaaatgggtcagatgtcccacgttatgttcggaggaatcacgcaccctgctgcagtagccttgtgtaggcagctggtttctatgactccagacgctctagaatgcgtgtttcttgcagattctggctcagtggccgttgaagtagcaatgaaaatggctttgcagtactggttgggccgaggtgaaaccaggcaacaattcctgacgcttaagcgagggtatcatggcgatacttttgctgctatgtccgtttgtgatcctgacaactccatgcacagtctttggcgcgggtatttaccggaacaccattttgcagctgcacctcagtgtggcttcgatgacgagtgggatgcaagggacgctgaggattttattaggttgattcaacaacatagaggtcagttagcggctgttattctcgaaccaattgtacaaggcgcaggaggtatgagattctatcatccaaggtatctgcaatgtgttagagaggcctgtgacagacatggtatcctgttaattgccgacgagatagctaccggtttcggtagaactggcactttatttgcttgtgagcacgcggcaatttctccagacattatgtgtgtcggaaaggcgcttaccggaggaactatgtcattggccgcaacactgacgactcgcgatgtggcagataccatttcattaagcccggcaggttgttttatgcatggaccaacttttatgggtaatccacttgcgtgtgccgtggccagtgaatcccttgccatggtacaggagggagactggaggcaacaggtggcagccattgagaggcaactgcgtggagccttattgcctctgagacacgctccggctgtagcagatgtaagagtacttggtgcaataggggtagtggaaactcaccaacctgtaaatatggctgccttacaacaattcttcgtaagtcaaggcgtctggattcgcccgttcggcagacttatttatcttatgcctccttatattatatcacctgaagctttggataagctggttaatgcaatcggagctgcactagaacagcccgcacattttttatcatga

SEQ ID NO: 334 - DNA, 1512 bp, synthetic construct
  source 1..1512: mol_type = other DNA; note = Stenotrophomonas maltophilia BioA nucleic acid  with MTP (SEQ ID NO: 334)
atgagtgtctcttgttgctgcaggaatcttgggaagacgatcaaaaaagctatcccctctcaccatctgcatttgaggtccttaggtggctctttatatagacgcattcaatcttcttcaatgttagctgatccaacaccaagccctttggctcatcattggagacaaagggaccttcaggttctatggcatccatgcacgcagatgcgtgaacaccctgacactctaccattagtgccgattgcacgtggagagggagcttggctcatcgatcatgatggtaatcgttatcttgatgctgtatcaagctggtggactaacctgtttggccacgcagaaccgcgaattggaggcgcaattgctgctcaagccactcagcttgaacaagtaatgttagctggattcggccacgaacccgctataactttagctgaacggttgctggcattagctccacgtcagcctggcagagagccactggccaaggtgttctatgcagataatggctcagccggcgtggaagtagctctgaagatggcatttcaatattttcagaacagaggcgagtcccggcgcacacgattcattgctctggaaaatggctaccacggtgaaaccttgggtgccttggcacttggagatatcccactgtataggagagtctatgcaccccttcttgccgaggccctttttgcaccttccccggatgcatatcttgctgaacctggacaatccgctgccgatagagccaggcaagcagccgatggcttagctactcttttcgatcaacacccaggtgaaatctgtgcagtgatactagagccgcgcctgcaatgtgctgggggtatgagaatgcacgatccggtgtatcttcagagggtgagagagttatgcgatgcccatggtgcctttatgattgccgatgagatagcgacaggttttggccgtactggaacgttgttcgcttgcgaacaagccggtgttatgcctgaccttatgtgtctgtctaagggcctcacaggtggatttcttcctctggccgccgtccttgcaactcaggcactctatgatgcatttcttgatgattctagagaacgtgcatttcttcatagtcactcttatactggtaatccactagcctgtgcagcagcacttaccacactagatatttttagagatgatgatgtaatcgcaaggaatcggagtatagccagcgtgatggggacactcgccgcaccctttaatgaccacccccacgtggccgatgtcaggcaggcaggaatggtcgtcgccttcgaattgtcccgtgatggtaacaagaggaccccatttgatcctgctatgagattaggtttacatgcatacaaagctgcccttaagcgtggtgtagttcttcgtcctctcggtgatgtcttgtactggatgcctccttactgtgtagacgacgagcagcttgagctgctcgctcataccactcttgctgctatagatgaggcaattgcatgtgcctga

SEQ ID NO: 335 - DNA, 1422 bp, synthetic construct
  source 1..1422: mol_type = other DNA; note = Chroococcidiopsis sp. CCMEE 29 BioA nucleic acid  wit h MTP (SEQ ID NO: 335)
atgtccgtgtcttgttgttgtagaaacttaggtaagaccataaagaaagcgatcccgtctcatcacttacatcttagatccttaggaggctcattgtacagaagaattcaatcatcatctatgtccgtggaggaaattcatcctagctatcctatttggcacccttccactcaaatgaaaacttctccacctccattgaaggtagttaagggacagggcgtcatgcttgagctcgaggacggtaggcagatactggactgtatttcctcatggtgggtaacaatccatggtcattctcatcctatcttggcaaatgccttatatcaacaggcacaacagcttgaacacgtcatttttgcagggtttactcatgaaccggcggaacaattagcaagaaagttattgaaccacttgcctaaatctctaacccgtgtttttttcagtgacaatggaagtactgcagttgaagtggctctgaaaatggcataccaatactggtataaccaaggtgagacccagcgtacatctttcatcggttttgagggaggttatcatggagataccctgggagcaatgtctgtcggtggttccactagttggtggcaaacttttcaactacttatgttttcaatcgatgttgttcctttcccagcaactttcgatcgtgacccaaatgttgaggcacatgaggcccagtctctagaaacaatcacaagattattgaaacaaaatcccgatcggtatgccggaatcttcatcgagccattggtacaaggtgctgcgggaatgcgtctttgtagacctcagtttttgcaggagcttgaatctttagcacgatcatttgacgttttgcttatatatgatgaagtcatgactggttttggtagaacaggggagttttttgcttgtttaaagtcagctacaactccagatatactttgcttatctaagggcttgagcgggggatgtttgcctttggcagtgactcttgctaccgaggatatttatcgagcattttactctgatgatatccataaggcattcttacatggacatagctacactggtaacccgttggcttgcgccaccggtgttgcttcacttgagcttttagagcagaatccagagtttcgggcaattgaacatcaacataggtattatctcgaaaagtggctgattggccatcccaaagtggagcaattgaggacttgtggcacaattgccgcgatggaggtccgtacggaggaccaatccagttactttaatgcaattggtccgacacttaggtcaagatttttggaggaaggatttctcttgcgaccattaggaaacactatttacattatgcccccttactgtataactcctaaccagcttgaatctatttaccaggcaattcggcgcgtgctcgatactctctaa

SEQ ID NO: 336 - DNA, 1467 bp, synthetic construct
  source 1..1467: mol_type = other DNA; note = Bacillus subtilis BioA nucleic acid  with MTP (SEQ ID NO:336)
atgtccgtgtcttgttgttgtagaaacttaggtaagaccataaagaaagcgatcccgtctcatcacttacatcttagatccttaggaggctcattgtacagaagaattcaatcatcatctatgaaacaaagcatgatagaaaaaagtaaaaaacatctctggcttcctttcactcaaatgaaagattatgatgaagatccattgatcattgagtccggaaatggtattatgctcaaagacatttccggtaaggagtattatgacggattttctagtgtctggttgaacgtacacggtcatcgtaaaaaggagatggacgaggccatacaaaaacagcttgaaaagattgctcattctacattgttgggcatgacaaacgtcccagccacagagctcgcagagatgttaaccggcattactccagagaaattaacccgcgtcttttattcagattcaggggccgaagcaatggagattgcattgaaaatggctttccagtattggaaaaacataggaagacctgagaagcaaacctttatctctatgcaaaacgggtatcacggtgatactataggcgcagtttcagtaggttcaattgaattgtttcatcacgtttacggaccattgatgtttgaaagttataaagcaccaattccatacgtctaccgttctgagtcaggggatcctgttcaatgtcgtgatgaatgtcttcatgcgctcgaacaattattagccaaacaccatgaggaaatcgctgctctcaccattgaatccatggttcaaggagcatcaggtatgatagtcatgccagaaggattcttggcaggcgtaagaaaattgtgtactgcctatgacgtgttgatgattgtcgatgaggttgctactggttttggtagaacaggaaagatgttcgcttgtgaacacgagaatgttcagccagacctgatggcagctggtaaggggatcacaggtggatacttgcctatagcagtgacattcgctaccgaggcaatctacgaagctttctatgatgattatgataaaatgaaaacttttttccacggccactcatacacgggtaatcagctgggttgtgctgcggcgatagaaaatttacgacttttcgagtcagagcgtatagttgaacaagttgcagagaagtccaaaacagcagcagaattcttacacgatttaaagcaactttctcatgtgggagacgtacgtcaactcggtttcatgtgtggaatagaattggttcaagataagggtacaaagcaaccctaccctcctgagaagcgaatgggatacaaggttagcttgaaaatgagggagttgggaatgttgacgcgtccactgggggacgtcatcgctttccttccccctttggcttcaactacagatcagttgcaagctatgatttctattatgaaggaagcaatcgctgaagtcactggtaggggattttag

SEQ ID NO: 337 - DNA, 1401 bp, synthetic construct
  source 1..1401: mol_type = other DNA; note = Streptomyces viridochromogenes BioA nucleic acid  wit h MTP (SEQ ID NO:337)
atgtccgtgtcttgttgttgtagaaacttaggtaagaccataaagaaagcgatcccgtctcatcacttacatcttagatccttaggaggctcattgtacagaagaattcaatcatcatctatgcctgacctgagtgtccctgaattgttggcactggatcggagacatgtgtggcatccttatggcccaatgccaggcagaattgatccactggttgtggagtctgcatctggtgtgagattgaagcttgccggtgggtctggggagcttgttgatgggatgagcagttggtggtctgcaattcatgggtataaccacccggttctgaacgaggctgcccatgagcaactgagcagaatgtcacacgttatgttcggtggtttgacacatgaaccggctgtgcgattggcaaaattgctagttgacatgtcacctgatgggttagagcatgtgtttttggctgacagcggtagtgttagtgttgaagtagccgttaagatgtgcttgcaatactggcgaagccttggtaggccaggtaagcagcgcttgttaacttggcgtggcgggtatcatggtgatacgtggcagccgatgtcagtttgcgatcctgagggtgggatgcatgaactttggaccggagtccttcaaagacaggtctttgcagacccacctccagctgtgtacgatgagagctatagcgatcatttgcgttcacttatcgaaagacatgctcatgagttagcagctgtaattgttgaaccagttgttcaaggcgctggagggatgcgtttccattcacctgcttatcttagggttttgagggaagcatgtgatgcccatgatgtgcttctcgtattcgacgagattgctaccggttttggacgtactggtgctctttttgcggctgaccatgctgctgtgaccccagatgttatgtgtatgggcaaagcccttacagggggatatttaacactggctgcaactgtctgtacctcaagagttgcagatggtatatctaggggtgaagtaccagtgttagcccatggacctacttttatgggcaacccactcgctgcagctgtagcttgcgcttctatcgagcttttgttaggtcaagattggttagctgaggtaaagagaattgaggccggattgcgtgaaggtcttgctcctgttgctgatcttcccggagttagggatgttcgcgtactcggtgcaataggggttgtccaattggatcacgctgtagatatgaaggccgctactgacgcagctgttcgtgagggcgtgtggctacgtccctttcgcgatttgatttatacaatgccaccttatgtgacaggcgatgctgatctcgccaggattgcaagggctgtctgtgctgctgctagagagggatga

SEQ ID NO: 338 - DNA, 1386 bp, synthetic construct
  source 1..1386: mol_type = other DNA; note = Pedobacter hartonius BioA nucleic acid  with MTP (SEQ ID NO:338)
atgtccgtgtcttgttgttgtagaaacttaggtaagaccataaagaaagcgatcccgtctcatcacttacatcttagatccttaggaggctcattgtacagaagaattcaatcatcatctatgacattaacacaacgagatgcagagtcaatttggcacccttatactcaacagttaaatgctaggcctcctttacctgtgttgtctggcaagggcgcttacttatacgatgaggagggttgtagatatattgacgcagttagcagttggtgggttactttgcatggtcattcccatccatacattgttgaacgcgttactgctcaacttcaacaattggaccaggttatcttcgctggctttactcatgaaccagcgattgctttggcggagaatttgttggctatccttcccgagggacaaaaaaaagtcttctacacagataacggaagcacagctgtcgaagtagctcttaagatgtgtgtgcagtactggtttaataagggaaaatccaggaaaaaggttttggccttcaacaatggataccatggagatacttttggagcaatgtccgtttctggtcgaagcgcctggaccgctccattcgataatttgctctttgaggtaatttttattgacactcctactgaggagaaccttccggttctgaaggaaattataagcgtgcatgctgccgaacttgcatgctttgtttatgaacctctcgtccaaggtagtgccggaatgttgatgtatgaagctcctgcattggatcagctgatggctcattgcctcgaagagggtgttttaatgatccaggacgaggtgtttactggattcggcagaaccggaaagaacttcgcggctgatcacctcaaaacccagcctgatgttatgtgcttttctaaaggtctgactggtggcactatgcccctcggcgtgaccacttgcactgaagatatttataatgcatttctgagtgaagataagttaaagactcttttccatggacattcattcacagcgaaccctctagcttgtaccgctgccttagcatcaattgagttattgttgcaacatgaagctcaagataacattcgaagaatttgcaacaggcacgctgagttctcattgaaaatttgcggtcaccaaaaagtcgctgcagtgagacaaactggtaccattattgcaatcgagtggcaaactgagtctggaacaagttatttcagtaaacttaggaatctgttgtacgattattttatggataagggtatactaatgagaccactaggtaacgttatatatatacttccgccttattgcattagcgatgaggacctaaaaaaaatataccaagaaattcaaaatgcgttggaaatcttttga

SEQ ID NO: 339 - DNA, 1371 bp, synthetic construct
  source 1..1371: mol_type = other DNA; note = Chitinophaga filiformis BioA nucleic acid  with MTP (SEQ ID NO:339)
atgtccgtgtcttgttgttgtagaaacttaggtaagaccataaagaaagcgatcccgtctcatcacttacatcttagatccttaggaggctcattgtacagaagaattcaatcatcatctatgctatggtatccatacactcagatgagacaaattaatgaattacctaagatggtgagtggcgaaggcgttatgatgcaccttgaggacggaaggagtctaatagatggcatttctagctggtgggctgttatccatggctataaccatcctgctcttaatgctgctttattaacgcaggctaacaagttcgcccatgttatgcttggtggaatgactcataatccagctctagatttagctgccaaacttgttagtatcactccacaggggctgaatcatgtattcttcagcgattcaggttcaataggagtcgaagtcgcattaaagatgtctattcaatactggaaaaatattgggtacaatggaaaatctaagataatttcacttagaaacgggtatcatggcgacacatttaaggccatggaagtatctgacgattctgattttactagggctttctctgatgttttacgtaggggatacatccttgatatcccggagggcgggttcgacgcagatgcagcgctagtaaaacaggctactgacaaactggaggctttgttacgacgcgagcaccacaatattgccgcttttatagttgaaccaatagttcaatgcgcgggtgggttcaatatatactcaccgctttacttgaaggctgcccgagaattgtgtactaagtataatgtactttttgtctttgatgaggttgccacagggtttggtaggacaggaaagctttttgctgctgaacacgctggagttacaccagatattatgatcctcggcaaagcgctaacggctggctacatgggacacgctgccaccttagctacatcagctgtttttgatagtttcttgggagacaattatgaaaaagcacttatgcacggccctacttttatggcaaatcccttggcctgcgctgtcgctttgagatcaatatcaattattgaagacgaacaatatcttcaaaagatcgctaaaatacaatcaattataagagagcaatttgatactttctcctcacccgcaattgtggcgaagaggagtataggcgctatcggggcgttggaaatgaaagatgcagcttgtctttctggcttcaaagagtttagtcaacagagaggagtatggttgagacccattggtaatgtgttatatttaatgccaccttatattatctcagagaaggagcttttgacaatattacaggtaataaaggattggatacagcagattaaataa

SEQ ID NO: 340 - DNA, 1386 bp, synthetic construct
  source 1..1386: mol_type = other DNA; note = Tenacibaculum adriaticum BioA nucleic acid  with MTP (SEQ ID NO:340)
atgtccgtgtcttgttgttgtagaaacttaggtaagaccataaagaaagcgatcccgtctcatcacttacatcttagatccttaggaggctcattgtacagaagaattcaatcatcatctatgaaccttaccgagcgagataagaagcatttgtggcatccattgactcaacaccaactttatcctaatcatcttgccattaccaaggcgaaaggagcaattttatacgatgataaaaataatgaatacatcgatggtatcgctagttggtacacttgtatgtacggccactgtaatgagtatattactagctcagtctataagcagatgcagcaattagaccatgttgtgtttgcaggatttacccacgaaccagcaatcaagctgagtgaagaattgataaagatcttgcccgagaaccaagagaaagtttttttctcagataacggtagtactagtgtagatgtcgctattaaaatggcactccaataccattttaaccagggggaaaagaaagggaagattattgccctagaagatggttttcatggagacacatttggtgcgatgtcagtatctggtctttcagtctataatggcccatttgaagattttttcatagatgtcgctaggatccccgttcccactcaagagaactttgaacatgtgaaagaagaattcataaagcttattaccgagcacaacgtagccgcatttgtttacgaaccattggttcaaggagccgcagctatgaaaatgtttgatggtaatttgttaaacgagcttattaaaattgctcaagagaacaatgtgctagctattgctgacgaggtgatgaccggctttggaaaaacagggaaaaactttgcttcagaatacctcgagcataagccagacataatttgtctttcaaagagtttgacagcaggattagttccaatggctatcacatcatgtagccagaaggtttacaatgcattcctttcagatgatatcgggaagggtttcttccatggccatacttatagtgctaatccggtagcatgtagcgcagctctcgcaggaattgagttgctacaaagtgaagagatccaagggaatatacaaaggattatcaaatctcaccaagagtttgattccaaaattaagaaacatcctaaagtaaagtctacaagacaaaaaggtattatttatgctctcgatcttaatgtagaaatggaaagatacggagacctaaggtataagctattcaatttttttatggaaaacggagtctgcctgaggcctttaggaaacacaatatatattttagcaccattcgttattacaaatgagcaattagaaaagatctacaaaacaatcgagaaagcactcgaaattctatga

SEQ ID NO: 341 - DNA, 2550 bp, Ostreococcus tauri
  source 1..2550: mol_type = other DNA; note = Ostreococcus tauri BioDA nucleic acid  (SEQ ID NO:341)
atgagtgctcccatcgcgaggagggcatcatctgttgcccgaggaaggacccgatggttgacatctactagcattgaaagatccagggaatggtttgttagaagcctcggcagtgcctctgatggagctgcttctggtaacggacgggcactagagctgagtatagcgtcctttgctatttggggagcaaacactggagtaggaaaaactctcgcaagcgctgggttagctagagccgccacccggcggggcactgctactacattcctcaagcccgttcaaactggttatccggaggattctgatgctggttttgttgctagacagacaaaaggtaatgaaaccgccggagagcatgctgccgtggcaagtggctctactgaaggtgggggagaaggatttgccgctggtgtgacaagggcccacacggagtttgcctggcgtcgggctgccgggcctcatctcacagctgcagaagaagggcgtccagtctctgatgaggaaattgttagggcaactaggaattacttgagagagttcgctgaatcagctcgggaaggtaacgctagaggttttgccgttatcgagaccgctggaggagtagcatctccaggaccatcaggtaccttgcagtgtgaaattctaagggcattaagattacccgcaattttaataggtgatggccgacttggtgggatttctacaacaacgtctgcatatgaatcactccacgcgagaggatacgatgttgtgggtgttttgatggctgatgacggatatgctaaccatgaagcagttgctaagattttacctagcggaacaaaggtatttgccttgcctccattacctccgcaaggtaaagccgacgcatggttggaaaaatcagctggcgtgtttagtgaggctttcgaaactgccatgaactggcatgagaagagaatacaggcattacagaaattaccaggtgaagctcttgagaaaatttggtggccatttacacaacatgcaactgttgaaccggatactgtaactgtgattgatggtcgttatggtgaggactttgagatttatgaccaagagaaaggccgtgatggggctatagacttgcgattcgacggcgccgcttcctggtggacccagggggtctccgcagagttacaacaggaactcaattcagctgcagccaatgcagctggtcgttacgggcatgttatgtttcccgaaaatgtgcaccaaccttccatggatgctactaacgccctgcttgagggtcctggcaaagggtggggttctagagtgttttactccgataatggcagcacagctaccgaagtaggattgaaaatggcttttaggaagtattacgtggacgcagggctcgtgagcaaagacggtcaccaaagagcaaaggatcttattaacgacggatcatgtcaccttccacaattgcggatcattgctcttgacggttcctaccatggcgatactttgggggcaatggatatgcagtcaccttcagttttcacaggtcctatgcaaaccccatggtatcaaccacggggcttatttcttcagccgcctagcctagcaatacggaatggagagtggactgttgctctacccccccatgggctactaaatgatggagaggaccgcttattccacgatgggaaggatctcgagtccaatacgacttggaaatctaaagcagatgcatttgatatcgggaagaggttggactcacctttagcaaacgagtataggcaggcagtcgataaagccttggaaagagcagaacaggatgctaaggccggacatatgggacctgtgggcgcactaatgatggagcctgtactccacggcgctggcggaatggtactaattgatcctttgttccagaacattttgatgaaggtgtgtagggaacgtaagatcccaatcgtgttggatgaggtatttgctggcatttggcgcttgggcactgaaggtgcgtgggagattatcggagaaaagcccgatatatcttgctatgcaaagctactgacgggaggcttgatgcccatgtctgcaaccgtcgctacagccgacgttttcgatgtgttctatggtccgggtaaagcgcagggtctgcttcacgggcattcctatactgcatatcctatcggatgcgctgttgctagcaaggcattgtccctttataaggatccagcgaagaatccgaatctgatagtcgatgcttcatctaaaggagatacacctactgcatacttgagagaattatgggatgagtccaaattgaaggagatatcaaacaaatccagtgtaagacgtgttttcggtcagggttgcgttttagccgtggaattggaggttgaaggcgaaggcggctattcatcaaatgcagctaaagaagttgttctacgattgagaccccattcagttcaagcaaggcctctgggtaacgttgtttatcttatgtgcgcacctactacacctaaggctacttgcgatcgcttattgaacgtccttgctgaggagttatcagaataa

SEQ ID NO: 342 - DNA, 2502 bp, synthetic construct
  source 1..2502: mol_type = other DNA; note = Arabidopsis thaliana BioDA nucleic acid C388D (SEQ ID NO:342)
atgattcccgtgaccgccactcttattcgtcacaggttgaggcacttgcgtcatcgaattaggtttaaatcaacctctgtatcaccattccatttgccgctcaatcatcctacttatttgatttggtctgccaacactagcctgggcaaaactttggtcagtacggggatagcagccagttttctcttacaacaacctagttcatcagcaacaaaactattgtatctcaaacccatccagacaggttttcctagtgattctgactcaagatttgttttttcaaagctcgactcattgtcattgcgaagacaaattcctataagtatctcaaattccgtacttcattcatcactccctgctgctaagtctcttggcctaaatgttgaagtaagcgagtctggaatgtgtagtctcaattttcgggatgagaaaactgttaccggcgctccagagttgttgtgcaagacactttatgcttgggaggctgcaatttcaccccatcttgctgcagagagagaaaacgcaactgttgaagactctgtggttcttcaaatgattgagaagtgcctgaaggaggagatggagtgcggagttaaatctgagaagagtgatctcttgtgtctagtcgaaactgctggcggagttgcttctcctggtccatctggaaccttgcaatgtgacctgtataggccgtttaggctccccggaattctagttggagacggcaggttggggggtatctctggcacaatagcagcctatgagagtctcaagcttcgtggatacgatatcgctgctgttgtcttcgaagatcacggactagttaacgaagtgccacttacatcatatttgaggaataaggtacctgtcctcgtattacctcctgtccctaaagacccttcagacgacttgatcgaatggttcgtggagtccgatggcgtattcaaagcacttaaggagacgatggtattagcgaaccttgaacgtcttgaaaggttgaatggtatggccaaactggctggtgaagtgttttggtggccattcacacagcataagcttgttcaccaagagaccgtaactgtgattgactccagatgtggcgagaatttttctatttataaggcatcagataattcttctttgagtcaacagttcgatgctgatgcaagttggtggacacaggggcctgaccctacttttcaggctgaattggctcgcgagatgggatacacagcggccaggttcggccatgtaatgttccccgaaaatgtttatgaacctgctcttaaatgtgctgagcttttgttagacggtgtaggaaagggatgggcttcacgcgtatacttctctgataatggctcaaccgcaatagagatcgctttgaagatggcttttaggaaattttgcgttgaccacaacttttgcgaagccacagaggaagagaaacacattgtggttaaggtaattgccctgagaggctcataccacggcgatactttgggtgctatggaggctcaggcgccatcaccatatactggttttcttcagcaaccctggtacacgggccggggcctatttttggatcctccaaccgtttttttgtctaacggttcttggaacatatctttgccggaaagtttctcagaaattgctcctgagtacggcaccttcacaagtcgtgatgaaatcttcgataagtcaagagacgcttcaacacttgcaagaatctattcagcttatctctcaaagcatttgcaggagcattcaggagttaggcagagtgcccatgttggtgcattaatcattgagccggtgattcatggtgcaggaggaatgcatatggtggatcctctatttcagagagtcctcgttaatgaatgtagaaatcgtaagatacctgtcatatttgacgaagtcttcactggtttttggagattgggagtggaaacgacaacagaacttctaggatgcaaacctgatattgcgtgctttgctaagctattgacgggcggtatggtacccttggctgtgacattggctacagatgcagttttcgatagttttagtggtgatagcaaattgaaagctctattgcacggacatagttactctgctcacgccatgggatgcgctaccgcggcgaaggcaatccaatggtttaaagatcctgaaaccaatcacaatatcacatctcaaggcaagaccctcagggaactgtgggacgaagaactagttcagcaaatctcttcacactcagcagtgcaacgcgttgttgtcataggaaccttgtttgctctcgagttgaaggcagacgcaagcaactcagggtacgcttcactctatgctaaatctttattgattatgttgagggaagatggcatctttacacgacctctgggtaacgtgatctacctcatgtgcggtccttgtacgagtcccgaaatatgtagacgactgctgactaaactgtataagcgtttgggtgaatttaatcgtacttaa

SEQ ID NO: 343 - DNA, 2502 bp, synthetic construct
  source 1..2502: mol_type = other DNA; note = Arabidopsis thaliana BioDA nucleic acid W392S (SEQ ID NO:343)
atgattcccgtgaccgccactcttattcgtcacaggttgaggcacttgcgtcatcgaattaggtttaaatcaacctctgtatcaccattccatttgccgctcaatcatcctacttatttgatttggtctgccaacactagcctgggcaaaactttggtcagtacggggatagcagccagttttctcttacaacaacctagttcatcagcaacaaaactattgtatctcaaacccatccagacaggttttcctagtgattctgactcaagatttgttttttcaaagctcgactcattgtcattgcgaagacaaattcctataagtatctcaaattccgtacttcattcatcactccctgctgctaagtctcttggcctaaatgttgaagtaagcgagtctggaatgtgtagtctcaattttcgggatgagaaaactgttaccggcgctccagagttgttgtgcaagacactttatgcttgggaggctgcaatttcaccccatcttgctgcagagagagaaaacgcaactgttgaagactctgtggttcttcaaatgattgagaagtgcctgaaggaggagatggagtgcggagttaaatctgagaagagtgatctcttgtgtctagtcgaaactgctggcggagttgcttctcctggtccatctggaaccttgcaatgtgacctgtataggccgtttaggctccccggaattctagttggagacggcaggttggggggtatctctggcacaatagcagcctatgagagtctcaagcttcgtggatacgatatcgctgctgttgtcttcgaagatcacggactagttaacgaagtgccacttacatcatatttgaggaataaggtacctgtcctcgtattacctcctgtccctaaagacccttcagacgacttgatcgaatggttcgtggagtccgatggcgtattcaaagcacttaaggagacgatggtattagcgaaccttgaacgtcttgaaaggttgaatggtatggccaaactggctggtgaagtgttttggtggccattcacacagcataagcttgttcaccaagagaccgtaactgtgattgactccagatgtggcgagaatttttctatttataaggcatcagataattcttctttgagtcaacagttcgatgcttgcgcaagttggtctacacaggggcctgaccctacttttcaggctgaattggctcgcgagatgggatacacagcggccaggttcggccatgtaatgttccccgaaaatgtttatgaacctgctcttaaatgtgctgagcttttgttagacggtgtaggaaagggatgggcttcacgcgtatacttctctgataatggctcaaccgcaatagagatcgctttgaagatggcttttaggaaattttgcgttgaccacaacttttgcgaagccacagaggaagagaaacacattgtggttaaggtaattgccctgagaggctcataccacggcgatactttgggtgctatggaggctcaggcgccatcaccatatactggttttcttcagcaaccctggtacacgggccggggcctatttttggatcctccaaccgtttttttgtctaacggttcttggaacatatctttgccggaaagtttctcagaaattgctcctgagtacggcaccttcacaagtcgtgatgaaatcttcgataagtcaagagacgcttcaacacttgcaagaatctattcagcttatctctcaaagcatttgcaggagcattcaggagttaggcagagtgcccatgttggtgcattaatcattgagccggtgattcatggtgcaggaggaatgcatatggtggatcctctatttcagagagtcctcgttaatgaatgtagaaatcgtaagatacctgtcatatttgacgaagtcttcactggtttttggagattgggagtggaaacgacaacagaacttctaggatgcaaacctgatattgcgtgctttgctaagctattgacgggcggtatggtacccttggctgtgacattggctacagatgcagttttcgatagttttagtggtgatagcaaattgaaagctctattgcacggacatagttactctgctcacgccatgggatgcgctaccgcggcgaaggcaatccaatggtttaaagatcctgaaaccaatcacaatatcacatctcaaggcaagaccctcagggaactgtgggacgaagaactagttcagcaaatctcttcacactcagcagtgcaacgcgttgttgtcataggaaccttgtttgctctcgagttgaaggcagacgcaagcaactcagggtacgcttcactctatgctaaatctttattgattatgttgagggaagatggcatctttacacgacctctgggtaacgtgatctacctcatgtgcggtccttgtacgagtcccgaaatatgtagacgactgctgactaaactgtataagcgtttgggtgaatttaatcgtacttaa

SEQ ID NO: 344 - DNA, 2502 bp, synthetic construct
  source 1..2502: mol_type = other DNA; note = Arabidopsis thaliana BioDA nucleic acid F348C (SEQ ID NO:344)
atgattcccgtgaccgccactcttattcgtcacaggttgaggcacttgcgtcatcgaattaggtttaaatcaacctctgtatcaccattccatttgccgctcaatcatcctacttatttgatttggtctgccaacactagcctgggcaaaactttggtcagtacggggatagcagccagttttctcttacaacaacctagttcatcagcaacaaaactattgtatctcaaacccatccagacaggttttcctagtgattctgactcaagatttgttttttcaaagctcgactcattgtcattgcgaagacaaattcctataagtatctcaaattccgtacttcattcatcactccctgctgctaagtctcttggcctaaatgttgaagtaagcgagtctggaatgtgtagtctcaattttcgggatgagaaaactgttaccggcgctccagagttgttgtgcaagacactttatgcttgggaggctgcaatttcaccccatcttgctgcagagagagaaaacgcaactgttgaagactctgtggttcttcaaatgattgagaagtgcctgaaggaggagatggagtgcggagttaaatctgagaagagtgatctcttgtgtctagtcgaaactgctggcggagttgcttctcctggtccatctggaaccttgcaatgtgacctgtataggccgtttaggctccccggaattctagttggagacggcaggttggggggtatctctggcacaatagcagcctatgagagtctcaagcttcgtggatacgatatcgctgctgttgtcttcgaagatcacggactagttaacgaagtgccacttacatcatatttgaggaataaggtacctgtcctcgtattacctcctgtccctaaagacccttcagacgacttgatcgaatggttcgtggagtccgatggcgtattcaaagcacttaaggagacgatggtattagcgaaccttgaacgtcttgaaaggttgaatggtatggccaaactggctggtgaagtgttttggtggccatgtacacagcataagcttgttcaccaagagaccgtaactgtgattgactccagatgtggcgagaatttttctatttataaggcatcagataattcttctttgagtcaacagttcgatgcttgcgcaagttggtggacacaggggcctgaccctacttttcaggctgaattggctcgcgagatgggatacacagcggccaggttcggccatgtaatgttccccgaaaatgtttatgaacctgctcttaaatgtgctgagcttttgttagacggtgtaggaaagggatgggcttcacgcgtatacttctctgataatggctcaaccgcaatagagatcgctttgaagatggcttttaggaaattttgcgttgaccacaacttttgcgaagccacagaggaagagaaacacattgtggttaaggtaattgccctgagaggctcataccacggcgatactttgggtgctatggaggctcaggcgccatcaccatatactggttttcttcagcaaccctggtacacgggccggggcctatttttggatcctccaaccgtttttttgtctaacggttcttggaacatatctttgccggaaagtttctcagaaattgctcctgagtacggcaccttcacaagtcgtgatgaaatcttcgataagtcaagagacgcttcaacacttgcaagaatctattcagcttatctctcaaagcatttgcaggagcattcaggagttaggcagagtgcccatgttggtgcattaatcattgagccggtgattcatggtgcaggaggaatgcatatggtggatcctctatttcagagagtcctcgttaatgaatgtagaaatcgtaagatacctgtcatatttgacgaagtcttcactggtttttggagattgggagtggaaacgacaacagaacttctaggatgcaaacctgatattgcgtgctttgctaagctattgacgggcggtatggtacccttggctgtgacattggctacagatgcagttttcgatagttttagtggtgatagcaaattgaaagctctattgcacggacatagttactctgctcacgccatgggatgcgctaccgcggcgaaggcaatccaatggtttaaagatcctgaaaccaatcacaatatcacatctcaaggcaagaccctcagggaactgtgggacgaagaactagttcagcaaatctcttcacactcagcagtgcaacgcgttgttgtcataggaaccttgtttgctctcgagttgaaggcagacgcaagcaactcagggtacgcttcactctatgctaaatctttattgattatgttgagggaagatggcatctttacacgacctctgggtaacgtgatctacctcatgtgcggtccttgtacgagtcccgaaatatgtagacgactgctgactaaactgtataagcgtttgggtgaatttaatcgtacttaa

SEQ ID NO: 345 - DNA, 2502 bp, synthetic construct
  source 1..2502: mol_type = other DNA; note = Arabidopsis thaliana BioDA nucleic acid G700S (SEQ ID NO:345)
atgattcccgtgaccgccactcttattcgtcacaggttgaggcacttgcgtcatcgaattaggtttaaatcaacctctgtatcaccattccatttgccgctcaatcatcctacttatttgatttggtctgccaacactagcctgggcaaaactttggtcagtacggggatagcagccagttttctcttacaacaacctagttcatcagcaacaaaactattgtatctcaaacccatccagacaggttttcctagtgattctgactcaagatttgttttttcaaagctcgactcattgtcattgcgaagacaaattcctataagtatctcaaattccgtacttcattcatcactccctgctgctaagtctcttggcctaaatgttgaagtaagcgagtctggaatgtgtagtctcaattttcgggatgagaaaactgttaccggcgctccagagttgttgtgcaagacactttatgcttgggaggctgcaatttcaccccatcttgctgcagagagagaaaacgcaactgttgaagactctgtggttcttcaaatgattgagaagtgcctgaaggaggagatggagtgcggagttaaatctgagaagagtgatctcttgtgtctagtcgaaactgctggcggagttgcttctcctggtccatctggaaccttgcaatgtgacctgtataggccgtttaggctccccggaattctagttggagacggcaggttggggggtatctctggcacaatagcagcctatgagagtctcaagcttcgtggatacgatatcgctgctgttgtcttcgaagatcacggactagttaacgaagtgccacttacatcatatttgaggaataaggtacctgtcctcgtattacctcctgtccctaaagacccttcagacgacttgatcgaatggttcgtggagtccgatggcgtattcaaagcacttaaggagacgatggtattagcgaaccttgaacgtcttgaaaggttgaatggtatggccaaactggctggtgaagtgttttggtggccattcacacagcataagcttgttcaccaagagaccgtaactgtgattgactccagatgtggcgagaatttttctatttataaggcatcagataattcttctttgagtcaacagttcgatgcttgcgcaagttggtggacacaggggcctgaccctacttttcaggctgaattggctcgcgagatgggatacacagcggccaggttcggccatgtaatgttccccgaaaatgtttatgaacctgctcttaaatgtgctgagcttttgttagacggtgtaggaaagggatgggcttcacgcgtatacttctctgataatggctcaaccgcaatagagatcgctttgaagatggcttttaggaaattttgcgttgaccacaacttttgcgaagccacagaggaagagaaacacattgtggttaaggtaattgccctgagaggctcataccacggcgatactttgggtgctatggaggctcaggcgccatcaccatatactggttttcttcagcaaccctggtacacgggccggggcctatttttggatcctccaaccgtttttttgtctaacggttcttggaacatatctttgccggaaagtttctcagaaattgctcctgagtacggcaccttcacaagtcgtgatgaaatcttcgataagtcaagagacgcttcaacacttgcaagaatctattcagcttatctctcaaagcatttgcaggagcattcaggagttaggcagagtgcccatgttggtgcattaatcattgagccggtgattcatggtgcaggaggaatgcatatggtggatcctctatttcagagagtcctcgttaatgaatgtagaaatcgtaagatacctgtcatatttgacgaagtcttcactggtttttggagattgggagtggaaacgacaacagaacttctaggatgcaaacctgatattgcgtgctttgctaagctattgacgggcggtatggtacccttggctgtgacattggctacagatgcagttttcgatagttttagtggtgatagcaaattgaaagctctattgcactctcatagttactctgctcacgccatgggatgcgctaccgcggcgaaggcaatccaatggtttaaagatcctgaaaccaatcacaatatcacatctcaaggcaagaccctcagggaactgtgggacgaagaactagttcagcaaatctcttcacactcagcagtgcaacgcgttgttgtcataggaaccttgtttgctctcgagttgaaggcagacgcaagcaactcagggtacgcttcactctatgctaaatctttattgattatgttgagggaagatggcatctttacacgacctctgggtaacgtgatctacctcatgtgcggtccttgtacgagtcccgaaatatgtagacgactgctgactaaactgtataagcgtttgggtgaatttaatcgtacttaa

SEQ ID NO: 346 - DNA, 2460 bp, synthetic construct
  source 1..2460: mol_type = other DNA; note = Zea mays BioDA nucleic acid C372D (SEQ ID NO: 346)
atggttagacgcctgtttcttcaccatgctcggaggagattgcattcaggtaccgcatcaagtattcctctttctactcctatatttgcgatattcggggctaatacgggcgtaggaaagacgttagtcagtgctgggttggctactgcactattatcttctccatcccctgcagtttcaagtgttgcttacttgaagccactacaaactggctatcctgtggactcagacgcgagctttgtattctctaggacaccagctttacttagagcatttccaccttgccgtgccaccaggctcatagctagttgtcgtacattcttccaatcaccagctgtcgaagctaaagcagagtcattgcatgaatcacaggaaaaagtggtgacgtacggcgcaggggctgcagagcagactaaggtcctggcatgctgtacagcttacgcctggcgagagccggtctccccacacctagcagccgagagagagggcatggctgctggcgatgatgaagtaaagggatgtgtggaacaatggctattggaagagggtatcggtgaaggtggagaggtgtggaaaatactggagactgctggtggtgtagctagccctagcgcttctggtacgttacaatgtgatctctataggccatttcgtcttcctgcaattcttgtaggtgatggacgattggggggtattagttctactttgtcagcctatgaaacacttctcttgaggggctatgatgtctcagccgtcatcctggaagaccgtgagttatctaatgataagtttcttctgtcataccttaggaatcgtgttcatgttttaatcttgccccaaataccagaggatccacttgatgacttgaccgattggttcagtgaatcttcaagcatatttatatttttaaaagatgaattgcaaagtttccattcaagacgtattgaaagacttaatagcatgcaaaggaagagtaaagcgttgctgtggtggccatttacccagcacaacttggttccccaggattctgttacagttattgatagcagatatggtgaaaatttctccgtttacaagattaaggataagatgcttatacctcaattcgatgcagatgctagttggtggactcaaggtcctgactccaatcttcaaattgagcttgctagagatatgggatatgctgctgctagatatggtcatgttatgtttcctgagaatgttcatgaacctgctctccatagtgctgaggtactcctcggtggtgtgggaaagggttgggcgagccgtgtttattatagcgataatgggagcaccgctattgagatcgctttaaaaatggcatttaggaaattttctttagaccacggtatcatggcttcatctgaaaactctactcgcaacgaaagaaatattcaactcaaagttttagcactaaatggatcttatcacggtgatacgcttggagcaatggaagcgcaagctccgtccgcttacaccagtttcctccaacagccttggtacagcggtaggggactttttctcgaccctccaaccgtatatattaagtcagaggtgtataacatttccttgcctcaatctatgcagcatgatccacaaacatatgggtttttttcacaggccgaagttttttgcaagacacgagataagacatttgcggctgatctgtattcatcttatataaagcaaaaattgtcagagttttctctttcctcatcatcagagcatttagccgccttgattattgaacctgttatacaaggggctggcggtatgctgatgattgatccgttattccagagagtgcttgtttcagaatgtagatcaaggaagatacctgttatttttgatgaggtctttacgggattctggcgtctaggtgttgagagcgcgtccgagcttcttggatgcctacctgatatcgcttgttacgccaagcttatgactggggggattatcccattagccgctactcttgctactgaggaggtttttgaaagtttcgagagcgactcaaaattgaccgccctcctgcatgggcactcttatactgcacatgcaatgggatgtactgcagctttaaaagctatgcagtggtataggggaccaagcacgaattcaaacttggatacagatcatatgaaattaaaggaattatgggacggcactctggtcaaacaactctccagcctgcctaacgtgaaaagagttgtctcacttgggactctttgtgcaatagagctaaaagcagaaggtgctgatgcgggatatgcttcactttacgcttcaagtttagtacaacaattaaggaaggaagatgatatctacattcgcccacttgggaatgtcatttaccttatgtgcggaccttgtaccccacgtgatagttgcacacgtcagcttctcaaggtccatagaagattgtgcgctctcaactaa

SEQ ID NO: 347 - protein, 812 aa, synthetic construct
  source 1..812: note = Arabidopsis thaliana BioDA delta MTP  protein A507K
MKSTSVSPFHLPLNHPTYLIWSANTSLGKTLVSTGIAASFLLQQPSSSATKLLYLKPIQTGFPSDSDSRFVFSKLDSLSLRRQIPISISNSVLHSSLPAAKSLGLNVEVSESGMCSLNFRDEKTVTGAPELLCKTLYAWEAAISPHLAAERENATVEDSVVLQMIEKCLKEEMECGVKSEKSDLLCLVETAGGVASPGPSGTLQCDLYRPFRLPGILVGDGRLGGISGTIAAYESLKLRGYDIAAVVFEDHGLVNEVPLTSYLRNKVPVLVLPPVPKDPSDDLIEWFVESDGVFKALKETMVLANLERLERLNGMAKLAGEVFWWPFTQHKLVHQETVTVIDSRCGENFSIYKASDNSSLSQQFDACASWWTQGPDPTFQAELAREMGYTAARFGHVMFPENVYEPALKCAELLLDGVGKGWASRVYFSDNGSTAIEIALKMAFRKFCVDHNFCEATEEEKHIVVKVIALRGSYHGDTLGAMEAQKPSPYTGFLQQPWYTGRGLFLDPPTVFLSNGSWNISLPESFSEIAPEYGTFTSRDEIFDKSRDASTLARIYSAYLSKHLQEHSGVRQSAHVGALIIEPVIHGAGGMHMVDPLFQRVLVNECRNRKIPVIFDEVFTGFWRLGVETTTELLGCKPDIACFAKLLTGGMVPLAVTLATDAVFDSFSGDSKLKALLHGHSYSAHAMGCATAAKAIQWFKDPETNHNITSQGKTLRELWDEELVQQISSHSAVQRVVVIGTLFALELKADASNSGYASLYAKSLLIMLREDGIFTRPLGNVIYLMCGPCTSPEICRRLLTKLYKRLGEFNRT

SEQ ID NO: 348 - protein, 812 aa, synthetic construct
  source 1..812: note = Arabidopsis thaliana BioDAdelta MTP  protein A507S
MKSTSVSPFHLPLNHPTYLIWSANTSLGKTLVSTGIAASFLLQQPSSSATKLLYLKPIQTGFPSDSDSRFVFSKLDSLSLRRQIPISISNSVLHSSLPAAKSLGLNVEVSESGMCSLNFRDEKTVTGAPELLCKTLYAWEAAISPHLAAERENATVEDSVVLQMIEKCLKEEMECGVKSEKSDLLCLVETAGGVASPGPSGTLQCDLYRPFRLPGILVGDGRLGGISGTIAAYESLKLRGYDIAAVVFEDHGLVNEVPLTSYLRNKVPVLVLPPVPKDPSDDLIEWFVESDGVFKALKETMVLANLERLERLNGMAKLAGEVFWWPFTQHKLVHQETVTVIDSRCGENFSIYKASDNSSLSQQFDACASWWTQGPDPTFQAELAREMGYTAARFGHVMFPENVYEPALKCAELLLDGVGKGWASRVYFSDNGSTAIEIALKMAFRKFCVDHNFCEATEEEKHIVVKVIALRGSYHGDTLGAMEAQSPSPYTGFLQQPWYTGRGLFLDPPTVFLSNGSWNISLPESFSEIAPEYGTFTSRDEIFDKSRDASTLARIYSAYLSKHLQEHSGVRQSAHVGALIIEPVIHGAGGMHMVDPLFQRVLVNECRNRKIPVIFDEVFTGFWRLGVETTTELLGCKPDIACFAKLLTGGMVPLAVTLATDAVFDSFSGDSKLKALLHGHSYSAHAMGCATAAKAIQWFKDPETNHNITSQGKTLRELWDEELVQQISSHSAVQRVVVIGTLFALELKADASNSGYASLYAKSLLIMLREDGIFTRPLGNVIYLMCGPCTSPEICRRLLTKLYKRLGEFNRT

SEQ ID NO: 349 - protein, 812 aa, synthetic construct
  source 1..812: note = Arabidopsis thaliana BioDAdelta MTP  protein A609C
MKSTSVSPFHLPLNHPTYLIWSANTSLGKTLVSTGIAASFLLQQPSSSATKLLYLKPIQTGFPSDSDSRFVFSKLDSLSLRRQIPISISNSVLHSSLPAAKSLGLNVEVSESGMCSLNFRDEKTVTGAPELLCKTLYAWEAAISPHLAAERENATVEDSVVLQMIEKCLKEEMECGVKSEKSDLLCLVETAGGVASPGPSGTLQCDLYRPFRLPGILVGDGRLGGISGTIAAYESLKLRGYDIAAVVFEDHGLVNEVPLTSYLRNKVPVLVLPPVPKDPSDDLIEWFVESDGVFKALKETMVLANLERLERLNGMAKLAGEVFWWPFTQHKLVHQETVTVIDSRCGENFSIYKASDNSSLSQQFDACASWWTQGPDPTFQAELAREMGYTAARFGHVMFPENVYEPALKCAELLLDGVGKGWASRVYFSDNGSTAIEIALKMAFRKFCVDHNFCEATEEEKHIVVKVIALRGSYHGDTLGAMEAQAPSPYTGFLQQPWYTGRGLFLDPPTVFLSNGSWNISLPESFSEIAPEYGTFTSRDEIFDKSRDASTLARIYSAYLSKHLQEHSGVRQSAHVGALIIEPVIHGCGGMHMVDPLFQRVLVNECRNRKIPVIFDEVFTGFWRLGVETTTELLGCKPDIACFAKLLTGGMVPLAVTLATDAVFDSFSGDSKLKALLHGHSYSAHAMGCATAAKAIQWFKDPETNHNITSQGKTLRELWDEELVQQISSHSAVQRVVVIGTLFALELKADASNSGYASLYAKSLLIMLREDGIFTRPLGNVIYLMCGPCTSPEICRRLLTKLYKRLGEFNRT

SEQ ID NO: 350 - protein, 812 aa, synthetic construct
  source 1..812: note = Arabidopsis thaliana BioDAdeltaMTP protein A609F
MKSTSVSPFHLPLNHPTYLIWSANTSLGKTLVSTGIAASFLLQQPSSSATKLLYLKPIQTGFPSDSDSRFVFSKLDSLSLRRQIPISISNSVLHSSLPAAKSLGLNVEVSESGMCSLNFRDEKTVTGAPELLCKTLYAWEAAISPHLAAERENATVEDSVVLQMIEKCLKEEMECGVKSEKSDLLCLVETAGGVASPGPSGTLQCDLYRPFRLPGILVGDGRLGGISGTIAAYESLKLRGYDIAAVVFEDHGLVNEVPLTSYLRNKVPVLVLPPVPKDPSDDLIEWFVESDGVFKALKETMVLANLERLERLNGMAKLAGEVFWWPFTQHKLVHQETVTVIDSRCGENFSIYKASDNSSLSQQFDACASWWTQGPDPTFQAELAREMGYTAARFGHVMFPENVYEPALKCAELLLDGVGKGWASRVYFSDNGSTAIEIALKMAFRKFCVDHNFCEATEEEKHIVVKVIALRGSYHGDTLGAMEAQAPSPYTGFLQQPWYTGRGLFLDPPTVFLSNGSWNISLPESFSEIAPEYGTFTSRDEIFDKSRDASTLARIYSAYLSKHLQEHSGVRQSAHVGALIIEPVIHGFGGMHMVDPLFQRVLVNECRNRKIPVIFDEVFTGFWRLGVETTTELLGCKPDIACFAKLLTGGMVPLAVTLATDAVFDSFSGDSKLKALLHGHSYSAHAMGCATAAKAIQWFKDPETNHNITSQGKTLRELWDEELVQQISSHSAVQRVVVIGTLFALELKADASNSGYASLYAKSLLIMLREDGIFTRPLGNVIYLMCGPCTSPEICRRLLTKLYKRLGEFNRT

SEQ ID NO: 351 - protein, 812 aa, synthetic construct
  source 1..812: note = Arabidopsis thaliana BioDAdeltaMTP protein A609H
MKSTSVSPFHLPLNHPTYLIWSANTSLGKTLVSTGIAASFLLQQPSSSATKLLYLKPIQTGFPSDSDSRFVFSKLDSLSLRRQIPISISNSVLHSSLPAAKSLGLNVEVSESGMCSLNFRDEKTVTGAPELLCKTLYAWEAAISPHLAAERENATVEDSVVLQMIEKCLKEEMECGVKSEKSDLLCLVETAGGVASPGPSGTLQCDLYRPFRLPGILVGDGRLGGISGTIAAYESLKLRGYDIAAVVFEDHGLVNEVPLTSYLRNKVPVLVLPPVPKDPSDDLIEWFVESDGVFKALKETMVLANLERLERLNGMAKLAGEVFWWPFTQHKLVHQETVTVIDSRCGENFSIYKASDNSSLSQQFDACASWWTQGPDPTFQAELAREMGYTAARFGHVMFPENVYEPALKCAELLLDGVGKGWASRVYFSDNGSTAIEIALKMAFRKFCVDHNFCEATEEEKHIVVKVIALRGSYHGDTLGAMEAQAPSPYTGFLQQPWYTGRGLFLDPPTVFLSNGSWNISLPESFSEIAPEYGTFTSRDEIFDKSRDASTLARIYSAYLSKHLQEHSGVRQSAHVGALIIEPVIHGHGGMHMVDPLFQRVLVNECRNRKIPVIFDEVFTGFWRLGVETTTELLGCKPDIACFAKLLTGGMVPLAVTLATDAVFDSFSGDSKLKALLHGHSYSAHAMGCATAAKAIQWFKDPETNHNITSQGKTLRELWDEELVQQISSHSAVQRVVVIGTLFALELKADASNSGYASLYAKSLLIMLREDGIFTRPLGNVIYLMCGPCTSPEICRRLLTKLYKRLGEFNRT

SEQ ID NO: 352 - protein, 812 aa, synthetic construct
  source 1..812: note = Arabidopsis thaliana BioDAdeltaMTP protein A609I
MKSTSVSPFHLPLNHPTYLIWSANTSLGKTLVSTGIAASFLLQQPSSSATKLLYLKPIQTGFPSDSDSRFVFSKLDSLSLRRQIPISISNSVLHSSLPAAKSLGLNVEVSESGMCSLNFRDEKTVTGAPELLCKTLYAWEAAISPHLAAERENATVEDSVVLQMIEKCLKEEMECGVKSEKSDLLCLVETAGGVASPGPSGTLQCDLYRPFRLPGILVGDGRLGGISGTIAAYESLKLRGYDIAAVVFEDHGLVNEVPLTSYLRNKVPVLVLPPVPKDPSDDLIEWFVESDGVFKALKETMVLANLERLERLNGMAKLAGEVFWWPFTQHKLVHQETVTVIDSRCGENFSIYKASDNSSLSQQFDACASWWTQGPDPTFQAELAREMGYTAARFGHVMFPENVYEPALKCAELLLDGVGKGWASRVYFSDNGSTAIEIALKMAFRKFCVDHNFCEATEEEKHIVVKVIALRGSYHGDTLGAMEAQAPSPYTGFLQQPWYTGRGLFLDPPTVFLSNGSWNISLPESFSEIAPEYGTFTSRDEIFDKSRDASTLARIYSAYLSKHLQEHSGVRQSAHVGALIIEPVIHGIGGMHMVDPLFQRVLVNECRNRKIPVIFDEVFTGFWRLGVETTTELLGCKPDIACFAKLLTGGMVPLAVTLATDAVFDSFSGDSKLKALLHGHSYSAHAMGCATAAKAIQWFKDPETNHNITSQGKTLRELWDEELVQQISSHSAVQRVVVIGTLFALELKADASNSGYASLYAKSLLIMLREDGIFTRPLGNVIYLMCGPCTSPEICRRLLTKLYKRLGEFNRT

SEQ ID NO: 353 - protein, 812 aa, synthetic construct
  source 1..812: note = Arabidopsis thaliana BioDAdeltaMTP protein A609M
MKSTSVSPFHLPLNHPTYLIWSANTSLGKTLVSTGIAASFLLQQPSSSATKLLYLKPIQTGFPSDSDSRFVFSKLDSLSLRRQIPISISNSVLHSSLPAAKSLGLNVEVSESGMCSLNFRDEKTVTGAPELLCKTLYAWEAAISPHLAAERENATVEDSVVLQMIEKCLKEEMECGVKSEKSDLLCLVETAGGVASPGPSGTLQCDLYRPFRLPGILVGDGRLGGISGTIAAYESLKLRGYDIAAVVFEDHGLVNEVPLTSYLRNKVPVLVLPPVPKDPSDDLIEWFVESDGVFKALKETMVLANLERLERLNGMAKLAGEVFWWPFTQHKLVHQETVTVIDSRCGENFSIYKASDNSSLSQQFDACASWWTQGPDPTFQAELAREMGYTAARFGHVMFPENVYEPALKCAELLLDGVGKGWASRVYFSDNGSTAIEIALKMAFRKFCVDHNFCEATEEEKHIVVKVIALRGSYHGDTLGAMEAQAPSPYTGFLQQPWYTGRGLFLDPPTVFLSNGSWNISLPESFSEIAPEYGTFTSRDEIFDKSRDASTLARIYSAYLSKHLQEHSGVRQSAHVGALIIEPVIHGMGGMHMVDPLFQRVLVNECRNRKIPVIFDEVFTGFWRLGVETTTELLGCKPDIACFAKLLTGGMVPLAVTLATDAVFDSFSGDSKLKALLHGHSYSAHAMGCATAAKAIQWFKDPETNHNITSQGKTLRELWDEELVQQISSHSAVQRVVVIGTLFALELKADASNSGYASLYAKSLLIMLREDGIFTRPLGNVIYLMCGPCTSPEICRRLLTKLYKRLGEFNRT

SEQ ID NO: 354 - protein, 812 aa, synthetic construct
  source 1..812: note = Arabidopsis thaliana BioDAdeltaMTP protein A609N (SEQ ID NO:
MKSTSVSPFHLPLNHPTYLIWSANTSLGKTLVSTGIAASFLLQQPSSSATKLLYLKPIQTGFPSDSDSRFVFSKLDSLSLRRQIPISISNSVLHSSLPAAKSLGLNVEVSESGMCSLNFRDEKTVTGAPELLCKTLYAWEAAISPHLAAERENATVEDSVVLQMIEKCLKEEMECGVKSEKSDLLCLVETAGGVASPGPSGTLQCDLYRPFRLPGILVGDGRLGGISGTIAAYESLKLRGYDIAAVVFEDHGLVNEVPLTSYLRNKVPVLVLPPVPKDPSDDLIEWFVESDGVFKALKETMVLANLERLERLNGMAKLAGEVFWWPFTQHKLVHQETVTVIDSRCGENFSIYKASDNSSLSQQFDACASWWTQGPDPTFQAELAREMGYTAARFGHVMFPENVYEPALKCAELLLDGVGKGWASRVYFSDNGSTAIEIALKMAFRKFCVDHNFCEATEEEKHIVVKVIALRGSYHGDTLGAMEAQAPSPYTGFLQQPWYTGRGLFLDPPTVFLSNGSWNISLPESFSEIAPEYGTFTSRDEIFDKSRDASTLARIYSAYLSKHLQEHSGVRQSAHVGALIIEPVIHGNGGMHMVDPLFQRVLVNECRNRKIPVIFDEVFTGFWRLGVETTTELLGCKPDIACFAKLLTGGMVPLAVTLATDAVFDSFSGDSKLKALLHGHSYSAHAMGCATAAKAIQWFKDPETNHNITSQGKTLRELWDEELVQQISSHSAVQRVVVIGTLFALELKADASNSGYASLYAKSLLIMLREDGIFTRPLGNVIYLMCGPCTSPEICRRLLTKLYKRLGEFNRT

SEQ ID NO: 355 - protein, 812 aa, synthetic construct
  source 1..812: note = Arabidopsis thaliana BioDAdeltaMTP protein A609T (SEQ ID NO:
MKSTSVSPFHLPLNHPTYLIWSANTSLGKTLVSTGIAASFLLQQPSSSATKLLYLKPIQTGFPSDSDSRFVFSKLDSLSLRRQIPISISNSVLHSSLPAAKSLGLNVEVSESGMCSLNFRDEKTVTGAPELLCKTLYAWEAAISPHLAAERENATVEDSVVLQMIEKCLKEEMECGVKSEKSDLLCLVETAGGVASPGPSGTLQCDLYRPFRLPGILVGDGRLGGISGTIAAYESLKLRGYDIAAVVFEDHGLVNEVPLTSYLRNKVPVLVLPPVPKDPSDDLIEWFVESDGVFKALKETMVLANLERLERLNGMAKLAGEVFWWPFTQHKLVHQETVTVIDSRCGENFSIYKASDNSSLSQQFDACASWWTQGPDPTFQAELAREMGYTAARFGHVMFPENVYEPALKCAELLLDGVGKGWASRVYFSDNGSTAIEIALKMAFRKFCVDHNFCEATEEEKHIVVKVIALRGSYHGDTLGAMEAQAPSPYTGFLQQPWYTGRGLFLDPPTVFLSNGSWNISLPESFSEIAPEYGTFTSRDEIFDKSRDASTLARIYSAYLSKHLQEHSGVRQSAHVGALIIEPVIHGTGGMHMVDPLFQRVLVNECRNRKIPVIFDEVFTGFWRLGVETTTELLGCKPDIACFAKLLTGGMVPLAVTLATDAVFDSFSGDSKLKALLHGHSYSAHAMGCATAAKAIQWFKDPETNHNITSQGKTLRELWDEELVQQISSHSAVQRVVVIGTLFALELKADASNSGYASLYAKSLLIMLREDGIFTRPLGNVIYLMCGPCTSPEICRRLLTKLYKRLGEFNRT

SEQ ID NO: 356 - protein, 812 aa, synthetic construct
  source 1..812: note = Arabidopsis thaliana BioDAdeltaMTPprotein A609V (SEQ ID NO:
MKSTSVSPFHLPLNHPTYLIWSANTSLGKTLVSTGIAASFLLQQPSSSATKLLYLKPIQTGFPSDSDSRFVFSKLDSLSLRRQIPISISNSVLHSSLPAAKSLGLNVEVSESGMCSLNFRDEKTVTGAPELLCKTLYAWEAAISPHLAAERENATVEDSVVLQMIEKCLKEEMECGVKSEKSDLLCLVETAGGVASPGPSGTLQCDLYRPFRLPGILVGDGRLGGISGTIAAYESLKLRGYDIAAVVFEDHGLVNEVPLTSYLRNKVPVLVLPPVPKDPSDDLIEWFVESDGVFKALKETMVLANLERLERLNGMAKLAGEVFWWPFTQHKLVHQETVTVIDSRCGENFSIYKASDNSSLSQQFDACASWWTQGPDPTFQAELAREMGYTAARFGHVMFPENVYEPALKCAELLLDGVGKGWASRVYFSDNGSTAIEIALKMAFRKFCVDHNFCEATEEEKHIVVKVIALRGSYHGDTLGAMEAQAPSPYTGFLQQPWYTGRGLFLDPPTVFLSNGSWNISLPESFSEIAPEYGTFTSRDEIFDKSRDASTLARIYSAYLSKHLQEHSGVRQSAHVGALIIEPVIHGVGGMHMVDPLFQRVLVNECRNRKIPVIFDEVFTGFWRLGVETTTELLGCKPDIACFAKLLTGGMVPLAVTLATDAVFDSFSGDSKLKALLHGHSYSAHAMGCATAAKAIQWFKDPETNHNITSQGKTLRELWDEELVQQISSHSAVQRVVVIGTLFALELKADASNSGYASLYAKSLLIMLREDGIFTRPLGNVIYLMCGPCTSPEICRRLLTKLYKRLGEFNRT

SEQ ID NO: 357 - protein, 812 aa, synthetic construct
  source 1..812: note = Arabidopsis thaliana BioDAdeltaMTP protein A609W
MKSTSVSPFHLPLNHPTYLIWSANTSLGKTLVSTGIAASFLLQQPSSSATKLLYLKPIQTGFPSDSDSRFVFSKLDSLSLRRQIPISISNSVLHSSLPAAKSLGLNVEVSESGMCSLNFRDEKTVTGAPELLCKTLYAWEAAISPHLAAERENATVEDSVVLQMIEKCLKEEMECGVKSEKSDLLCLVETAGGVASPGPSGTLQCDLYRPFRLPGILVGDGRLGGISGTIAAYESLKLRGYDIAAVVFEDHGLVNEVPLTSYLRNKVPVLVLPPVPKDPSDDLIEWFVESDGVFKALKETMVLANLERLERLNGMAKLAGEVFWWPFTQHKLVHQETVTVIDSRCGENFSIYKASDNSSLSQQFDACASWWTQGPDPTFQAELAREMGYTAARFGHVMFPENVYEPALKCAELLLDGVGKGWASRVYFSDNGSTAIEIALKMAFRKFCVDHNFCEATEEEKHIVVKVIALRGSYHGDTLGAMEAQAPSPYTGFLQQPWYTGRGLFLDPPTVFLSNGSWNISLPESFSEIAPEYGTFTSRDEIFDKSRDASTLARIYSAYLSKHLQEHSGVRQSAHVGALIIEPVIHGWGGMHMVDPLFQRVLVNECRNRKIPVIFDEVFTGFWRLGVETTTELLGCKPDIACFAKLLTGGMVPLAVTLATDAVFDSFSGDSKLKALLHGHSYSAHAMGCATAAKAIQWFKDPETNHNITSQGKTLRELWDEELVQQISSHSAVQRVVVIGTLFALELKADASNSGYASLYAKSLLIMLREDGIFTRPLGNVIYLMCGPCTSPEICRRLLTKLYKRLGEFNRT

SEQ ID NO: 358 - protein, 812 aa, synthetic construct
  source 1..812: note = Arabidopsis thaliana BioDAdeltaMTP protein C388D (SEQ ID NO:
MKSTSVSPFHLPLNHPTYLIWSANTSLGKTLVSTGIAASFLLQQPSSSATKLLYLKPIQTGFPSDSDSRFVFSKLDSLSLRRQIPISISNSVLHSSLPAAKSLGLNVEVSESGMCSLNFRDEKTVTGAPELLCKTLYAWEAAISPHLAAERENATVEDSVVLQMIEKCLKEEMECGVKSEKSDLLCLVETAGGVASPGPSGTLQCDLYRPFRLPGILVGDGRLGGISGTIAAYESLKLRGYDIAAVVFEDHGLVNEVPLTSYLRNKVPVLVLPPVPKDPSDDLIEWFVESDGVFKALKETMVLANLERLERLNGMAKLAGEVFWWPFTQHKLVHQETVTVIDSRCGENFSIYKASDNSSLSQQFDADASWWTQGPDPTFQAELAREMGYTAARFGHVMFPENVYEPALKCAELLLDGVGKGWASRVYFSDNGSTAIEIALKMAFRKFCVDHNFCEATEEEKHIVVKVIALRGSYHGDTLGAMEAQAPSPYTGFLQQPWYTGRGLFLDPPTVFLSNGSWNISLPESFSEIAPEYGTFTSRDEIFDKSRDASTLARIYSAYLSKHLQEHSGVRQSAHVGALIIEPVIHGAGGMHMVDPLFQRVLVNECRNRKIPVIFDEVFTGFWRLGVETTTELLGCKPDIACFAKLLTGGMVPLAVTLATDAVFDSFSGDSKLKALLHGHSYSAHAMGCATAAKAIQWFKDPETNHNITSQGKTLRELWDEELVQQISSHSAVQRVVVIGTLFALELKADASNSGYASLYAKSLLIMLREDGIFTRPLGNVIYLMCGPCTSPEICRRLLTKLYKRLGEFNRT

SEQ ID NO: 359 - protein, 812 aa, synthetic construct
  source 1..812: note = Arabidopsis thaliana BioDAdeltaMTP protein C388T (SEQ ID NO:
MKSTSVSPFHLPLNHPTYLIWSANTSLGKTLVSTGIAASFLLQQPSSSATKLLYLKPIQTGFPSDSDSRFVFSKLDSLSLRRQIPISISNSVLHSSLPAAKSLGLNVEVSESGMCSLNFRDEKTVTGAPELLCKTLYAWEAAISPHLAAERENATVEDSVVLQMIEKCLKEEMECGVKSEKSDLLCLVETAGGVASPGPSGTLQCDLYRPFRLPGILVGDGRLGGISGTIAAYESLKLRGYDIAAVVFEDHGLVNEVPLTSYLRNKVPVLVLPPVPKDPSDDLIEWFVESDGVFKALKETMVLANLERLERLNGMAKLAGEVFWWPFTQHKLVHQETVTVIDSRCGENFSIYKASDNSSLSQQFDATASWWTQGPDPTFQAELAREMGYTAARFGHVMFPENVYEPALKCAELLLDGVGKGWASRVYFSDNGSTAIEIALKMAFRKFCVDHNFCEATEEEKHIVVKVIALRGSYHGDTLGAMEAQAPSPYTGFLQQPWYTGRGLFLDPPTVFLSNGSWNISLPESFSEIAPEYGTFTSRDEIFDKSRDASTLARIYSAYLSKHLQEHSGVRQSAHVGALIIEPVIHGAGGMHMVDPLFQRVLVNECRNRKIPVIFDEVFTGFWRLGVETTTELLGCKPDIACFAKLLTGGMVPLAVTLATDAVFDSFSGDSKLKALLHGHSYSAHAMGCATAAKAIQWFKDPETNHNITSQGKTLRELWDEELVQQISSHSAVQRVVVIGTLFALELKADASNSGYASLYAKSLLIMLREDGIFTRPLGNVIYLMCGPCTSPEICRRLLTKLYKRLGEFNRT

SEQ ID NO: 360 - protein, 812 aa, synthetic construct
  source 1..812: note = Arabidopsis thaliana BioDAdeltaMTP protein F348C (SEQ ID NO:
MKSTSVSPFHLPLNHPTYLIWSANTSLGKTLVSTGIAASFLLQQPSSSATKLLYLKPIQTGFPSDSDSRFVFSKLDSLSLRRQIPISISNSVLHSSLPAAKSLGLNVEVSESGMCSLNFRDEKTVTGAPELLCKTLYAWEAAISPHLAAERENATVEDSVVLQMIEKCLKEEMECGVKSEKSDLLCLVETAGGVASPGPSGTLQCDLYRPFRLPGILVGDGRLGGISGTIAAYESLKLRGYDIAAVVFEDHGLVNEVPLTSYLRNKVPVLVLPPVPKDPSDDLIEWFVESDGVFKALKETMVLANLERLERLNGMAKLAGEVFWWPCTQHKLVHQETVTVIDSRCGENFSIYKASDNSSLSQQFDACASWWTQGPDPTFQAELAREMGYTAARFGHVMFPENVYEPALKCAELLLDGVGKGWASRVYFSDNGSTAIEIALKMAFRKFCVDHNFCEATEEEKHIVVKVIALRGSYHGDTLGAMEAQAPSPYTGFLQQPWYTGRGLFLDPPTVFLSNGSWNISLPESFSEIAPEYGTFTSRDEIFDKSRDASTLARIYSAYLSKHLQEHSGVRQSAHVGALIIEPVIHGAGGMHMVDPLFQRVLVNECRNRKIPVIFDEVFTGFWRLGVETTTELLGCKPDIACFAKLLTGGMVPLAVTLATDAVFDSFSGDSKLKALLHGHSYSAHAMGCATAAKAIQWFKDPETNHNITSQGKTLRELWDEELVQQISSHSAVQRVVVIGTLFALELKADASNSGYASLYAKSLLIMLREDGIFTRPLGNVIYLMCGPCTSPEICRRLLTKLYKRLGEFNRT

SEQ ID NO: 361 - protein, 812 aa, synthetic construct
  source 1..812: note = Arabidopsis thaliana BioDAdeltaMTP protein F348D (SEQ ID NO:
MKSTSVSPFHLPLNHPTYLIWSANTSLGKTLVSTGIAASFLLQQPSSSATKLLYLKPIQTGFPSDSDSRFVFSKLDSLSLRRQIPISISNSVLHSSLPAAKSLGLNVEVSESGMCSLNFRDEKTVTGAPELLCKTLYAWEAAISPHLAAERENATVEDSVVLQMIEKCLKEEMECGVKSEKSDLLCLVETAGGVASPGPSGTLQCDLYRPFRLPGILVGDGRLGGISGTIAAYESLKLRGYDIAAVVFEDHGLVNEVPLTSYLRNKVPVLVLPPVPKDPSDDLIEWFVESDGVFKALKETMVLANLERLERLNGMAKLAGEVFWWPDTQHKLVHQETVTVIDSRCGENFSIYKASDNSSLSQQFDACASWWTQGPDPTFQAELAREMGYTAARFGHVMFPENVYEPALKCAELLLDGVGKGWASRVYFSDNGSTAIEIALKMAFRKFCVDHNFCEATEEEKHIVVKVIALRGSYHGDTLGAMEAQAPSPYTGFLQQPWYTGRGLFLDPPTVFLSNGSWNISLPESFSEIAPEYGTFTSRDEIFDKSRDASTLARIYSAYLSKHLQEHSGVRQSAHVGALIIEPVIHGAGGMHMVDPLFQRVLVNECRNRKIPVIFDEVFTGFWRLGVETTTELLGCKPDIACFAKLLTGGMVPLAVTLATDAVFDSFSGDSKLKALLHGHSYSAHAMGCATAAKAIQWFKDPETNHNITSQGKTLRELWDEELVQQISSHSAVQRVVVIGTLFALELKADASNSGYASLYAKSLLIMLREDGIFTRPLGNVIYLMCGPCTSPEICRRLLTKLYKRLGEFNRT

SEQ ID NO: 362 - protein, 812 aa, synthetic construct
  source 1..812: note = Arabidopsis thaliana BioDAdeltaMTP protein F348N (SEQ ID NO:
MKSTSVSPFHLPLNHPTYLIWSANTSLGKTLVSTGIAASFLLQQPSSSATKLLYLKPIQTGFPSDSDSRFVFSKLDSLSLRRQIPISISNSVLHSSLPAAKSLGLNVEVSESGMCSLNFRDEKTVTGAPELLCKTLYAWEAAISPHLAAERENATVEDSVVLQMIEKCLKEEMECGVKSEKSDLLCLVETAGGVASPGPSGTLQCDLYRPFRLPGILVGDGRLGGISGTIAAYESLKLRGYDIAAVVFEDHGLVNEVPLTSYLRNKVPVLVLPPVPKDPSDDLIEWFVESDGVFKALKETMVLANLERLERLNGMAKLAGEVFWWPNTQHKLVHQETVTVIDSRCGENFSIYKASDNSSLSQQFDACASWWTQGPDPTFQAELAREMGYTAARFGHVMFPENVYEPALKCAELLLDGVGKGWASRVYFSDNGSTAIEIALKMAFRKFCVDHNFCEATEEEKHIVVKVIALRGSYHGDTLGAMEAQAPSPYTGFLQQPWYTGRGLFLDPPTVFLSNGSWNISLPESFSEIAPEYGTFTSRDEIFDKSRDASTLARIYSAYLSKHLQEHSGVRQSAHVGALIIEPVIHGAGGMHMVDPLFQRVLVNECRNRKIPVIFDEVFTGFWRLGVETTTELLGCKPDIACFAKLLTGGMVPLAVTLATDAVFDSFSGDSKLKALLHGHSYSAHAMGCATAAKAIQWFKDPETNHNITSQGKTLRELWDEELVQQISSHSAVQRVVVIGTLFALELKADASNSGYASLYAKSLLIMLREDGIFTRPLGNVIYLMCGPCTSPEICRRLLTKLYKRLGEFNRT

SEQ ID NO: 363 - protein, 812 aa, synthetic construct
  source 1..812: note = Arabidopsis thaliana BioDAdeltaMTP protein F348S (SEQ ID NO:
MKSTSVSPFHLPLNHPTYLIWSANTSLGKTLVSTGIAASFLLQQPSSSATKLLYLKPIQTGFPSDSDSRFVFSKLDSLSLRRQIPISISNSVLHSSLPAAKSLGLNVEVSESGMCSLNFRDEKTVTGAPELLCKTLYAWEAAISPHLAAERENATVEDSVVLQMIEKCLKEEMECGVKSEKSDLLCLVETAGGVASPGPSGTLQCDLYRPFRLPGILVGDGRLGGISGTIAAYESLKLRGYDIAAVVFEDHGLVNEVPLTSYLRNKVPVLVLPPVPKDPSDDLIEWFVESDGVFKALKETMVLANLERLERLNGMAKLAGEVFWWPSTQHKLVHQETVTVIDSRCGENFSIYKASDNSSLSQQFDACASWWTQGPDPTFQAELAREMGYTAARFGHVMFPENVYEPALKCAELLLDGVGKGWASRVYFSDNGSTAIEIALKMAFRKFCVDHNFCEATEEEKHIVVKVIALRGSYHGDTLGAMEAQAPSPYTGFLQQPWYTGRGLFLDPPTVFLSNGSWNISLPESFSEIAPEYGTFTSRDEIFDKSRDASTLARIYSAYLSKHLQEHSGVRQSAHVGALIIEPVIHGAGGMHMVDPLFQRVLVNECRNRKIPVIFDEVFTGFWRLGVETTTELLGCKPDIACFAKLLTGGMVPLAVTLATDAVFDSFSGDSKLKALLHGHSYSAHAMGCATAAKAIQWFKDPETNHNITSQGKTLRELWDEELVQQISSHSAVQRVVVIGTLFALELKADASNSGYASLYAKSLLIMLREDGIFTRPLGNVIYLMCGPCTSPEICRRLLTKLYKRLGEFNRT

SEQ ID NO: 364 - protein, 812 aa, synthetic construct
  source 1..812: note = Arabidopsis thaliana BioDAdeltaMTP protein F348T (SEQ ID NO:
MKSTSVSPFHLPLNHPTYLIWSANTSLGKTLVSTGIAASFLLQQPSSSATKLLYLKPIQTGFPSDSDSRFVFSKLDSLSLRRQIPISISNSVLHSSLPAAKSLGLNVEVSESGMCSLNFRDEKTVTGAPELLCKTLYAWEAAISPHLAAERENATVEDSVVLQMIEKCLKEEMECGVKSEKSDLLCLVETAGGVASPGPSGTLQCDLYRPFRLPGILVGDGRLGGISGTIAAYESLKLRGYDIAAVVFEDHGLVNEVPLTSYLRNKVPVLVLPPVPKDPSDDLIEWFVESDGVFKALKETMVLANLERLERLNGMAKLAGEVFWWPTTQHKLVHQETVTVIDSRCGENFSIYKASDNSSLSQQFDACASWWTQGPDPTFQAELAREMGYTAARFGHVMFPENVYEPALKCAELLLDGVGKGWASRVYFSDNGSTAIEIALKMAFRKFCVDHNFCEATEEEKHIVVKVIALRGSYHGDTLGAMEAQAPSPYTGFLQQPWYTGRGLFLDPPTVFLSNGSWNISLPESFSEIAPEYGTFTSRDEIFDKSRDASTLARIYSAYLSKHLQEHSGVRQSAHVGALIIEPVIHGAGGMHMVDPLFQRVLVNECRNRKIPVIFDEVFTGFWRLGVETTTELLGCKPDIACFAKLLTGGMVPLAVTLATDAVFDSFSGDSKLKALLHGHSYSAHAMGCATAAKAIQWFKDPETNHNITSQGKTLRELWDEELVQQISSHSAVQRVVVIGTLFALELKADASNSGYASLYAKSLLIMLREDGIFTRPLGNVIYLMCGPCTSPEICRRLLTKLYKRLGEFNRT

SEQ ID NO: 365 - protein, 812 aa, synthetic construct
  source 1..812: note = Arabidopsis thaliana BioDAdeltaMTP protein F348V (SEQ ID NO:
MKSTSVSPFHLPLNHPTYLIWSANTSLGKTLVSTGIAASFLLQQPSSSATKLLYLKPIQTGFPSDSDSRFVFSKLDSLSLRRQIPISISNSVLHSSLPAAKSLGLNVEVSESGMCSLNFRDEKTVTGAPELLCKTLYAWEAAISPHLAAERENATVEDSVVLQMIEKCLKEEMECGVKSEKSDLLCLVETAGGVASPGPSGTLQCDLYRPFRLPGILVGDGRLGGISGTIAAYESLKLRGYDIAAVVFEDHGLVNEVPLTSYLRNKVPVLVLPPVPKDPSDDLIEWFVESDGVFKALKETMVLANLERLERLNGMAKLAGEVFWWPVTQHKLVHQETVTVIDSRCGENFSIYKASDNSSLSQQFDACASWWTQGPDPTFQAELAREMGYTAARFGHVMFPENVYEPALKCAELLLDGVGKGWASRVYFSDNGSTAIEIALKMAFRKFCVDHNFCEATEEEKHIVVKVIALRGSYHGDTLGAMEAQAPSPYTGFLQQPWYTGRGLFLDPPTVFLSNGSWNISLPESFSEIAPEYGTFTSRDEIFDKSRDASTLARIYSAYLSKHLQEHSGVRQSAHVGALIIEPVIHGAGGMHMVDPLFQRVLVNECRNRKIPVIFDEVFTGFWRLGVETTTELLGCKPDIACFAKLLTGGMVPLAVTLATDAVFDSFSGDSKLKALLHGHSYSAHAMGCATAAKAIQWFKDPETNHNITSQGKTLRELWDEELVQQISSHSAVQRVVVIGTLFALELKADASNSGYASLYAKSLLIMLREDGIFTRPLGNVIYLMCGPCTSPEICRRLLTKLYKRLGEFNRT

SEQ ID NO: 366 - protein, 811 aa, synthetic construct
  source 1..811: note = Arabidopsis thaliana BioDAdeltaMTP protein G513DEL (SEQ ID NO:
MKSTSVSPFHLPLNHPTYLIWSANTSLGKTLVSTGIAASFLLQQPSSSATKLLYLKPIQTGFPSDSDSRFVFSKLDSLSLRRQIPISISNSVLHSSLPAAKSLGLNVEVSESGMCSLNFRDEKTVTGAPELLCKTLYAWEAAISPHLAAERENATVEDSVVLQMIEKCLKEEMECGVKSEKSDLLCLVETAGGVASPGPSGTLQCDLYRPFRLPGILVGDGRLGGISGTIAAYESLKLRGYDIAAVVFEDHGLVNEVPLTSYLRNKVPVLVLPPVPKDPSDDLIEWFVESDGVFKALKETMVLANLERLERLNGMAKLAGEVFWWPFTQHKLVHQETVTVIDSRCGENFSIYKASDNSSLSQQFDACASWWTQGPDPTFQAELAREMGYTAARFGHVMFPENVYEPALKCAELLLDGVGKGWASRVYFSDNGSTAIEIALKMAFRKFCVDHNFCEATEEEKHIVVKVIALRGSYHGDTLGAMEAQAPSPYTFLQQPWYTGRGLFLDPPTVFLSNGSWNISLPESFSEIAPEYGTFTSRDEIFDKSRDASTLARIYSAYLSKHLQEHSGVRQSAHVGALIIEPVIHGAGGMHMVDPLFQRVLVNECRNRKIPVIFDEVFTGFWRLGVETTTELLGCKPDIACFAKLLTGGMVPLAVTLATDAVFDSFSGDSKLKALLHGHSYSAHAMGCATAAKAIQWFKDPETNHNITSQGKTLRELWDEELVQQISSHSAVQRVVVIGTLFALELKADASNSGYASLYAKSLLIMLREDGIFTRPLGNVIYLMCGPCTSPEICRRLLTKLYKRLGEFNRT

SEQ ID NO: 367 - protein, 812 aa, synthetic construct
  source 1..812: note = Arabidopsis thaliana BioDAdeltaMTP protein G513L (SEQ ID NO:
MKSTSVSPFHLPLNHPTYLIWSANTSLGKTLVSTGIAASFLLQQPSSSATKLLYLKPIQTGFPSDSDSRFVFSKLDSLSLRRQIPISISNSVLHSSLPAAKSLGLNVEVSESGMCSLNFRDEKTVTGAPELLCKTLYAWEAAISPHLAAERENATVEDSVVLQMIEKCLKEEMECGVKSEKSDLLCLVETAGGVASPGPSGTLQCDLYRPFRLPGILVGDGRLGGISGTIAAYESLKLRGYDIAAVVFEDHGLVNEVPLTSYLRNKVPVLVLPPVPKDPSDDLIEWFVESDGVFKALKETMVLANLERLERLNGMAKLAGEVFWWPFTQHKLVHQETVTVIDSRCGENFSIYKASDNSSLSQQFDACASWWTQGPDPTFQAELAREMGYTAARFGHVMFPENVYEPALKCAELLLDGVGKGWASRVYFSDNGSTAIEIALKMAFRKFCVDHNFCEATEEEKHIVVKVIALRGSYHGDTLGAMEAQAPSPYTLFLQQPWYTGRGLFLDPPTVFLSNGSWNISLPESFSEIAPEYGTFTSRDEIFDKSRDASTLARIYSAYLSKHLQEHSGVRQSAHVGALIIEPVIHGAGGMHMVDPLFQRVLVNECRNRKIPVIFDEVFTGFWRLGVETTTELLGCKPDIACFAKLLTGGMVPLAVTLATDAVFDSFSGDSKLKALLHGHSYSAHAMGCATAAKAIQWFKDPETNHNITSQGKTLRELWDEELVQQISSHSAVQRVVVIGTLFALELKADASNSGYASLYAKSLLIMLREDGIFTRPLGNVIYLMCGPCTSPEICRRLLTKLYKRLGEFNRT

SEQ ID NO: 368 - protein, 812 aa, synthetic construct
  source 1..812: note = Arabidopsis thaliana BioDAdeltaMTP protein G513P (SEQ ID NO:
MKSTSVSPFHLPLNHPTYLIWSANTSLGKTLVSTGIAASFLLQQPSSSATKLLYLKPIQTGFPSDSDSRFVFSKLDSLSLRRQIPISISNSVLHSSLPAAKSLGLNVEVSESGMCSLNFRDEKTVTGAPELLCKTLYAWEAAISPHLAAERENATVEDSVVLQMIEKCLKEEMECGVKSEKSDLLCLVETAGGVASPGPSGTLQCDLYRPFRLPGILVGDGRLGGISGTIAAYESLKLRGYDIAAVVFEDHGLVNEVPLTSYLRNKVPVLVLPPVPKDPSDDLIEWFVESDGVFKALKETMVLANLERLERLNGMAKLAGEVFWWPFTQHKLVHQETVTVIDSRCGENFSIYKASDNSSLSQQFDACASWWTQGPDPTFQAELAREMGYTAARFGHVMFPENVYEPALKCAELLLDGVGKGWASRVYFSDNGSTAIEIALKMAFRKFCVDHNFCEATEEEKHIVVKVIALRGSYHGDTLGAMEAQAPSPYTPFLQQPWYTGRGLFLDPPTVFLSNGSWNISLPESFSEIAPEYGTFTSRDEIFDKSRDASTLARIYSAYLSKHLQEHSGVRQSAHVGALIIEPVIHGAGGMHMVDPLFQRVLVNECRNRKIPVIFDEVFTGFWRLGVETTTELLGCKPDIACFAKLLTGGMVPLAVTLATDAVFDSFSGDSKLKALLHGHSYSAHAMGCATAAKAIQWFKDPETNHNITSQGKTLRELWDEELVQQISSHSAVQRVVVIGTLFALELKADASNSGYASLYAKSLLIMLREDGIFTRPLGNVIYLMCGPCTSPEICRRLLTKLYKRLGEFNRT

SEQ ID NO: 369 - protein, 812 aa, synthetic construct
  source 1..812: note = Arabidopsis thaliana BioDAdeltaMTP protein G608E (SEQ ID NO:
MKSTSVSPFHLPLNHPTYLIWSANTSLGKTLVSTGIAASFLLQQPSSSATKLLYLKPIQTGFPSDSDSRFVFSKLDSLSLRRQIPISISNSVLHSSLPAAKSLGLNVEVSESGMCSLNFRDEKTVTGAPELLCKTLYAWEAAISPHLAAERENATVEDSVVLQMIEKCLKEEMECGVKSEKSDLLCLVETAGGVASPGPSGTLQCDLYRPFRLPGILVGDGRLGGISGTIAAYESLKLRGYDIAAVVFEDHGLVNEVPLTSYLRNKVPVLVLPPVPKDPSDDLIEWFVESDGVFKALKETMVLANLERLERLNGMAKLAGEVFWWPFTQHKLVHQETVTVIDSRCGENFSIYKASDNSSLSQQFDACASWWTQGPDPTFQAELAREMGYTAARFGHVMFPENVYEPALKCAELLLDGVGKGWASRVYFSDNGSTAIEIALKMAFRKFCVDHNFCEATEEEKHIVVKVIALRGSYHGDTLGAMEAQAPSPYTGFLQQPWYTGRGLFLDPPTVFLSNGSWNISLPESFSEIAPEYGTFTSRDEIFDKSRDASTLARIYSAYLSKHLQEHSGVRQSAHVGALIIEPVIHEAGGMHMVDPLFQRVLVNECRNRKIPVIFDEVFTGFWRLGVETTTELLGCKPDIACFAKLLTGGMVPLAVTLATDAVFDSFSGDSKLKALLHGHSYSAHAMGCATAAKAIQWFKDPETNHNITSQGKTLRELWDEELVQQISSHSAVQRVVVIGTLFALELKADASNSGYASLYAKSLLIMLREDGIFTRPLGNVIYLMCGPCTSPEICRRLLTKLYKRLGEFNRT

SEQ ID NO: 370 - protein, 812 aa, synthetic construct
  source 1..812: note = Arabidopsis thaliana BioDAdeltaMTP protein G700A (SEQ ID NO:
MKSTSVSPFHLPLNHPTYLIWSANTSLGKTLVSTGIAASFLLQQPSSSATKLLYLKPIQTGFPSDSDSRFVFSKLDSLSLRRQIPISISNSVLHSSLPAAKSLGLNVEVSESGMCSLNFRDEKTVTGAPELLCKTLYAWEAAISPHLAAERENATVEDSVVLQMIEKCLKEEMECGVKSEKSDLLCLVETAGGVASPGPSGTLQCDLYRPFRLPGILVGDGRLGGISGTIAAYESLKLRGYDIAAVVFEDHGLVNEVPLTSYLRNKVPVLVLPPVPKDPSDDLIEWFVESDGVFKALKETMVLANLERLERLNGMAKLAGEVFWWPFTQHKLVHQETVTVIDSRCGENFSIYKASDNSSLSQQFDACASWWTQGPDPTFQAELAREMGYTAARFGHVMFPENVYEPALKCAELLLDGVGKGWASRVYFSDNGSTAIEIALKMAFRKFCVDHNFCEATEEEKHIVVKVIALRGSYHGDTLGAMEAQAPSPYTGFLQQPWYTGRGLFLDPPTVFLSNGSWNISLPESFSEIAPEYGTFTSRDEIFDKSRDASTLARIYSAYLSKHLQEHSGVRQSAHVGALIIEPVIHGAGGMHMVDPLFQRVLVNECRNRKIPVIFDEVFTGFWRLGVETTTELLGCKPDIACFAKLLTGGMVPLAVTLATDAVFDSFSGDSKLKALLHAHSYSAHAMGCATAAKAIQWFKDPETNHNITSQGKTLRELWDEELVQQISSHSAVQRVVVIGTLFALELKADASNSGYASLYAKSLLIMLREDGIFTRPLGNVIYLMCGPCTSPEICRRLLTKLYKRLGEFNRT

SEQ ID NO: 371 - protein, 812 aa, synthetic construct
  source 1..812: note = Arabidopsis thaliana BioDA DELTAMTP protein G700S (SEQ ID NO:
MKSTSVSPFHLPLNHPTYLIWSANTSLGKTLVSTGIAASFLLQQPSSSATKLLYLKPIQTGFPSDSDSRFVFSKLDSLSLRRQIPISISNSVLHSSLPAAKSLGLNVEVSESGMCSLNFRDEKTVTGAPELLCKTLYAWEAAISPHLAAERENATVEDSVVLQMIEKCLKEEMECGVKSEKSDLLCLVETAGGVASPGPSGTLQCDLYRPFRLPGILVGDGRLGGISGTIAAYESLKLRGYDIAAVVFEDHGLVNEVPLTSYLRNKVPVLVLPPVPKDPSDDLIEWFVESDGVFKALKETMVLANLERLERLNGMAKLAGEVFWWPFTQHKLVHQETVTVIDSRCGENFSIYKASDNSSLSQQFDACASWWTQGPDPTFQAELAREMGYTAARFGHVMFPENVYEPALKCAELLLDGVGKGWASRVYFSDNGSTAIEIALKMAFRKFCVDHNFCEATEEEKHIVVKVIALRGSYHGDTLGAMEAQAPSPYTGFLQQPWYTGRGLFLDPPTVFLSNGSWNISLPESFSEIAPEYGTFTSRDEIFDKSRDASTLARIYSAYLSKHLQEHSGVRQSAHVGALIIEPVIHGAGGMHMVDPLFQRVLVNECRNRKIPVIFDEVFTGFWRLGVETTTELLGCKPDIACFAKLLTGGMVPLAVTLATDAVFDSFSGDSKLKALLHSHSYSAHAMGCATAAKAIQWFKDPETNHNITSQGKTLRELWDEELVQQISSHSAVQRVVVIGTLFALELKADASNSGYASLYAKSLLIMLREDGIFTRPLGNVIYLMCGPCTSPEICRRLLTKLYKRLGEFNRT

SEQ ID NO: 372 - protein, 812 aa, synthetic construct
  source 1..812: note = Arabidopsis thaliana BioDA DELTAMTP protein L786S (SEQ ID NO:
MKSTSVSPFHLPLNHPTYLIWSANTSLGKTLVSTGIAASFLLQQPSSSATKLLYLKPIQTGFPSDSDSRFVFSKLDSLSLRRQIPISISNSVLHSSLPAAKSLGLNVEVSESGMCSLNFRDEKTVTGAPELLCKTLYAWEAAISPHLAAERENATVEDSVVLQMIEKCLKEEMECGVKSEKSDLLCLVETAGGVASPGPSGTLQCDLYRPFRLPGILVGDGRLGGISGTIAAYESLKLRGYDIAAVVFEDHGLVNEVPLTSYLRNKVPVLVLPPVPKDPSDDLIEWFVESDGVFKALKETMVLANLERLERLNGMAKLAGEVFWWPFTQHKLVHQETVTVIDSRCGENFSIYKASDNSSLSQQFDACASWWTQGPDPTFQAELAREMGYTAARFGHVMFPENVYEPALKCAELLLDGVGKGWASRVYFSDNGSTAIEIALKMAFRKFCVDHNFCEATEEEKHIVVKVIALRGSYHGDTLGAMEAQAPSPYTGFLQQPWYTGRGLFLDPPTVFLSNGSWNISLPESFSEIAPEYGTFTSRDEIFDKSRDASTLARIYSAYLSKHLQEHSGVRQSAHVGALIIEPVIHGAGGMHMVDPLFQRVLVNECRNRKIPVIFDEVFTGFWRLGVETTTELLGCKPDIACFAKLLTGGMVPLAVTLATDAVFDSFSGDSKLKALLHGHSYSAHAMGCATAAKAIQWFKDPETNHNITSQGKTLRELWDEELVQQISSHSAVQRVVVIGTLFALELKADASNSGYASLYAKSLSIMLREDGIFTRPLGNVIYLMCGPCTSPEICRRLLTKLYKRLGEFNRT

SEQ ID NO: 373 - protein, 812 aa, synthetic construct
  source 1..812: note = Arabidopsis thaliana BioDA DELTAMTP protein P421L (SEQ ID NO:
MKSTSVSPFHLPLNHPTYLIWSANTSLGKTLVSTGIAASFLLQQPSSSATKLLYLKPIQTGFPSDSDSRFVFSKLDSLSLRRQIPISISNSVLHSSLPAAKSLGLNVEVSESGMCSLNFRDEKTVTGAPELLCKTLYAWEAAISPHLAAERENATVEDSVVLQMIEKCLKEEMECGVKSEKSDLLCLVETAGGVASPGPSGTLQCDLYRPFRLPGILVGDGRLGGISGTIAAYESLKLRGYDIAAVVFEDHGLVNEVPLTSYLRNKVPVLVLPPVPKDPSDDLIEWFVESDGVFKALKETMVLANLERLERLNGMAKLAGEVFWWPFTQHKLVHQETVTVIDSRCGENFSIYKASDNSSLSQQFDACASWWTQGPDPTFQAELAREMGYTAARFGHVMFLENVYEPALKCAELLLDGVGKGWASRVYFSDNGSTAIEIALKMAFRKFCVDHNFCEATEEEKHIVVKVIALRGSYHGDTLGAMEAQAPSPYTGFLQQPWYTGRGLFLDPPTVFLSNGSWNISLPESFSEIAPEYGTFTSRDEIFDKSRDASTLARIYSAYLSKHLQEHSGVRQSAHVGALIIEPVIHGAGGMHMVDPLFQRVLVNECRNRKIPVIFDEVFTGFWRLGVETTTELLGCKPDIACFAKLLTGGMVPLAVTLATDAVFDSFSGDSKLKALLHGHSYSAHAMGCATAAKAIQWFKDPETNHNITSQGKTLRELWDEELVQQISSHSAVQRVVVIGTLFALELKADASNSGYASLYAKSLLIMLREDGIFTRPLGNVIYLMCGPCTSPEICRRLLTKLYKRLGEFNRT

SEQ ID NO: 374 - protein, 811 aa, synthetic construct
  source 1..811: note = Arabidopsis thaliana BioDA DELTAMTP protein P508DEL (SEQ ID NO:
MKSTSVSPFHLPLNHPTYLIWSANTSLGKTLVSTGIAASFLLQQPSSSATKLLYLKPIQTGFPSDSDSRFVFSKLDSLSLRRQIPISISNSVLHSSLPAAKSLGLNVEVSESGMCSLNFRDEKTVTGAPELLCKTLYAWEAAISPHLAAERENATVEDSVVLQMIEKCLKEEMECGVKSEKSDLLCLVETAGGVASPGPSGTLQCDLYRPFRLPGILVGDGRLGGISGTIAAYESLKLRGYDIAAVVFEDHGLVNEVPLTSYLRNKVPVLVLPPVPKDPSDDLIEWFVESDGVFKALKETMVLANLERLERLNGMAKLAGEVFWWPFTQHKLVHQETVTVIDSRCGENFSIYKASDNSSLSQQFDACASWWTQGPDPTFQAELAREMGYTAARFGHVMFPENVYEPALKCAELLLDGVGKGWASRVYFSDNGSTAIEIALKMAFRKFCVDHNFCEATEEEKHIVVKVIALRGSYHGDTLGAMEAQASPYTGFLQQPWYTGRGLFLDPPTVFLSNGSWNISLPESFSEIAPEYGTFTSRDEIFDKSRDASTLARIYSAYLSKHLQEHSGVRQSAHVGALIIEPVIHGAGGMHMVDPLFQRVLVNECRNRKIPVIFDEVFTGFWRLGVETTTELLGCKPDIACFAKLLTGGMVPLAVTLATDAVFDSFSGDSKLKALLHGHSYSAHAMGCATAAKAIQWFKDPETNHNITSQGKTLRELWDEELVQQISSHSAVQRVVVIGTLFALELKADASNSGYASLYAKSLLIMLREDGIFTRPLGNVIYLMCGPCTSPEICRRLLTKLYKRLGEFNRT

SEQ ID NO: 375 - protein, 812 aa, synthetic construct
  source 1..812: note = Arabidopsis thaliana BioDA DELTAMTP protein P508L (SEQ ID NO:
MKSTSVSPFHLPLNHPTYLIWSANTSLGKTLVSTGIAASFLLQQPSSSATKLLYLKPIQTGFPSDSDSRFVFSKLDSLSLRRQIPISISNSVLHSSLPAAKSLGLNVEVSESGMCSLNFRDEKTVTGAPELLCKTLYAWEAAISPHLAAERENATVEDSVVLQMIEKCLKEEMECGVKSEKSDLLCLVETAGGVASPGPSGTLQCDLYRPFRLPGILVGDGRLGGISGTIAAYESLKLRGYDIAAVVFEDHGLVNEVPLTSYLRNKVPVLVLPPVPKDPSDDLIEWFVESDGVFKALKETMVLANLERLERLNGMAKLAGEVFWWPFTQHKLVHQETVTVIDSRCGENFSIYKASDNSSLSQQFDACASWWTQGPDPTFQAELAREMGYTAARFGHVMFPENVYEPALKCAELLLDGVGKGWASRVYFSDNGSTAIEIALKMAFRKFCVDHNFCEATEEEKHIVVKVIALRGSYHGDTLGAMEAQALSPYTGFLQQPWYTGRGLFLDPPTVFLSNGSWNISLPESFSEIAPEYGTFTSRDEIFDKSRDASTLARIYSAYLSKHLQEHSGVRQSAHVGALIIEPVIHGAGGMHMVDPLFQRVLVNECRNRKIPVIFDEVFTGFWRLGVETTTELLGCKPDIACFAKLLTGGMVPLAVTLATDAVFDSFSGDSKLKALLHGHSYSAHAMGCATAAKAIQWFKDPETNHNITSQGKTLRELWDEELVQQISSHSAVQRVVVIGTLFALELKADASNSGYASLYAKSLLIMLREDGIFTRPLGNVIYLMCGPCTSPEICRRLLTKLYKRLGEFNRT

SEQ ID NO: 376 - protein, 812 aa, synthetic construct
  source 1..812: note = Arabidopsis thaliana BioDA DELTAMTP protein P508T (SEQ ID NO:
MKSTSVSPFHLPLNHPTYLIWSANTSLGKTLVSTGIAASFLLQQPSSSATKLLYLKPIQTGFPSDSDSRFVFSKLDSLSLRRQIPISISNSVLHSSLPAAKSLGLNVEVSESGMCSLNFRDEKTVTGAPELLCKTLYAWEAAISPHLAAERENATVEDSVVLQMIEKCLKEEMECGVKSEKSDLLCLVETAGGVASPGPSGTLQCDLYRPFRLPGILVGDGRLGGISGTIAAYESLKLRGYDIAAVVFEDHGLVNEVPLTSYLRNKVPVLVLPPVPKDPSDDLIEWFVESDGVFKALKETMVLANLERLERLNGMAKLAGEVFWWPFTQHKLVHQETVTVIDSRCGENFSIYKASDNSSLSQQFDACASWWTQGPDPTFQAELAREMGYTAARFGHVMFPENVYEPALKCAELLLDGVGKGWASRVYFSDNGSTAIEIALKMAFRKFCVDHNFCEATEEEKHIVVKVIALRGSYHGDTLGAMEAQATSPYTGFLQQPWYTGRGLFLDPPTVFLSNGSWNISLPESFSEIAPEYGTFTSRDEIFDKSRDASTLARIYSAYLSKHLQEHSGVRQSAHVGALIIEPVIHGAGGMHMVDPLFQRVLVNECRNRKIPVIFDEVFTGFWRLGVETTTELLGCKPDIACFAKLLTGGMVPLAVTLATDAVFDSFSGDSKLKALLHGHSYSAHAMGCATAAKAIQWFKDPETNHNITSQGKTLRELWDEELVQQISSHSAVQRVVVIGTLFALELKADASNSGYASLYAKSLLIMLREDGIFTRPLGNVIYLMCGPCTSPEICRRLLTKLYKRLGEFNRT

SEQ ID NO: 377 - protein, 812 aa, synthetic construct
  source 1..812: note = Arabidopsis thaliana BioDA DELTAMTP protein P510L (SEQ ID NO:
MKSTSVSPFHLPLNHPTYLIWSANTSLGKTLVSTGIAASFLLQQPSSSATKLLYLKPIQTGFPSDSDSRFVFSKLDSLSLRRQIPISISNSVLHSSLPAAKSLGLNVEVSESGMCSLNFRDEKTVTGAPELLCKTLYAWEAAISPHLAAERENATVEDSVVLQMIEKCLKEEMECGVKSEKSDLLCLVETAGGVASPGPSGTLQCDLYRPFRLPGILVGDGRLGGISGTIAAYESLKLRGYDIAAVVFEDHGLVNEVPLTSYLRNKVPVLVLPPVPKDPSDDLIEWFVESDGVFKALKETMVLANLERLERLNGMAKLAGEVFWWPFTQHKLVHQETVTVIDSRCGENFSIYKASDNSSLSQQFDACASWWTQGPDPTFQAELAREMGYTAARFGHVMFPENVYEPALKCAELLLDGVGKGWASRVYFSDNGSTAIEIALKMAFRKFCVDHNFCEATEEEKHIVVKVIALRGSYHGDTLGAMEAQAPSLYTGFLQQPWYTGRGLFLDPPTVFLSNGSWNISLPESFSEIAPEYGTFTSRDEIFDKSRDASTLARIYSAYLSKHLQEHSGVRQSAHVGALIIEPVIHGAGGMHMVDPLFQRVLVNECRNRKIPVIFDEVFTGFWRLGVETTTELLGCKPDIACFAKLLTGGMVPLAVTLATDAVFDSFSGDSKLKALLHGHSYSAHAMGCATAAKAIQWFKDPETNHNITSQGKTLRELWDEELVQQISSHSAVQRVVVIGTLFALELKADASNSGYASLYAKSLLIMLREDGIFTRPLGNVIYLMCGPCTSPEICRRLLTKLYKRLGEFNRT

SEQ ID NO: 378 - protein, 812 aa, synthetic construct
  source 1..812: note = Arabidopsis thaliana BioDA DELTAMTP protein Q506A (SEQ ID NO:
MKSTSVSPFHLPLNHPTYLIWSANTSLGKTLVSTGIAASFLLQQPSSSATKLLYLKPIQTGFPSDSDSRFVFSKLDSLSLRRQIPISISNSVLHSSLPAAKSLGLNVEVSESGMCSLNFRDEKTVTGAPELLCKTLYAWEAAISPHLAAERENATVEDSVVLQMIEKCLKEEMECGVKSEKSDLLCLVETAGGVASPGPSGTLQCDLYRPFRLPGILVGDGRLGGISGTIAAYESLKLRGYDIAAVVFEDHGLVNEVPLTSYLRNKVPVLVLPPVPKDPSDDLIEWFVESDGVFKALKETMVLANLERLERLNGMAKLAGEVFWWPFTQHKLVHQETVTVIDSRCGENFSIYKASDNSSLSQQFDACASWWTQGPDPTFQAELAREMGYTAARFGHVMFPENVYEPALKCAELLLDGVGKGWASRVYFSDNGSTAIEIALKMAFRKFCVDHNFCEATEEEKHIVVKVIALRGSYHGDTLGAMEAAAPSPYTGFLQQPWYTGRGLFLDPPTVFLSNGSWNISLPESFSEIAPEYGTFTSRDEIFDKSRDASTLARIYSAYLSKHLQEHSGVRQSAHVGALIIEPVIHGAGGMHMVDPLFQRVLVNECRNRKIPVIFDEVFTGFWRLGVETTTELLGCKPDIACFAKLLTGGMVPLAVTLATDAVFDSFSGDSKLKALLHGHSYSAHAMGCATAAKAIQWFKDPETNHNITSQGKTLRELWDEELVQQISSHSAVQRVVVIGTLFALELKADASNSGYASLYAKSLLIMLREDGIFTRPLGNVIYLMCGPCTSPEICRRLLTKLYKRLGEFNRT

SEQ ID NO: 379 - protein, 812 aa, synthetic construct
  source 1..812: note = Arabidopsis thaliana BioDA DELTAMTP protein Q516C (SEQ ID NO:
MKSTSVSPFHLPLNHPTYLIWSANTSLGKTLVSTGIAASFLLQQPSSSATKLLYLKPIQTGFPSDSDSRFVFSKLDSLSLRRQIPISISNSVLHSSLPAAKSLGLNVEVSESGMCSLNFRDEKTVTGAPELLCKTLYAWEAAISPHLAAERENATVEDSVVLQMIEKCLKEEMECGVKSEKSDLLCLVETAGGVASPGPSGTLQCDLYRPFRLPGILVGDGRLGGISGTIAAYESLKLRGYDIAAVVFEDHGLVNEVPLTSYLRNKVPVLVLPPVPKDPSDDLIEWFVESDGVFKALKETMVLANLERLERLNGMAKLAGEVFWWPFTQHKLVHQETVTVIDSRCGENFSIYKASDNSSLSQQFDACASWWTQGPDPTFQAELAREMGYTAARFGHVMFPENVYEPALKCAELLLDGVGKGWASRVYFSDNGSTAIEIALKMAFRKFCVDHNFCEATEEEKHIVVKVIALRGSYHGDTLGAMEAQAPSPYTGFLCQPWYTGRGLFLDPPTVFLSNGSWNISLPESFSEIAPEYGTFTSRDEIFDKSRDASTLARIYSAYLSKHLQEHSGVRQSAHVGALIIEPVIHGAGGMHMVDPLFQRVLVNECRNRKIPVIFDEVFTGFWRLGVETTTELLGCKPDIACFAKLLTGGMVPLAVTLATDAVFDSFSGDSKLKALLHGHSYSAHAMGCATAAKAIQWFKDPETNHNITSQGKTLRELWDEELVQQISSHSAVQRVVVIGTLFALELKADASNSGYASLYAKSLLIMLREDGIFTRPLGNVIYLMCGPCTSPEICRRLLTKLYKRLGEFNRT

SEQ ID NO: 380 - protein, 812 aa, synthetic construct
  source 1..812: note = Arabidopsis thaliana BioDA DELTAMTP protein Q517D (SEQ ID NO:
MKSTSVSPFHLPLNHPTYLIWSANTSLGKTLVSTGIAASFLLQQPSSSATKLLYLKPIQTGFPSDSDSRFVFSKLDSLSLRRQIPISISNSVLHSSLPAAKSLGLNVEVSESGMCSLNFRDEKTVTGAPELLCKTLYAWEAAISPHLAAERENATVEDSVVLQMIEKCLKEEMECGVKSEKSDLLCLVETAGGVASPGPSGTLQCDLYRPFRLPGILVGDGRLGGISGTIAAYESLKLRGYDIAAVVFEDHGLVNEVPLTSYLRNKVPVLVLPPVPKDPSDDLIEWFVESDGVFKALKETMVLANLERLERLNGMAKLAGEVFWWPFTQHKLVHQETVTVIDSRCGENFSIYKASDNSSLSQQFDACASWWTQGPDPTFQAELAREMGYTAARFGHVMFPENVYEPALKCAELLLDGVGKGWASRVYFSDNGSTAIEIALKMAFRKFCVDHNFCEATEEEKHIVVKVIALRGSYHGDTLGAMEAQAPSPYTGFLQDPWYTGRGLFLDPPTVFLSNGSWNISLPESFSEIAPEYGTFTSRDEIFDKSRDASTLARIYSAYLSKHLQEHSGVRQSAHVGALIIEPVIHGAGGMHMVDPLFQRVLVNECRNRKIPVIFDEVFTGFWRLGVETTTELLGCKPDIACFAKLLTGGMVPLAVTLATDAVFDSFSGDSKLKALLHGHSYSAHAMGCATAAKAIQWFKDPETNHNITSQGKTLRELWDEELVQQISSHSAVQRVVVIGTLFALELKADASNSGYASLYAKSLLIMLREDGIFTRPLGNVIYLMCGPCTSPEICRRLLTKLYKRLGEFNRT

SEQ ID NO: 381 - protein, 812 aa, synthetic construct
  source 1..812: note = Arabidopsis thaliana BioDA DELTAMTP protein Q517F (SEQ ID NO:
MKSTSVSPFHLPLNHPTYLIWSANTSLGKTLVSTGIAASFLLQQPSSSATKLLYLKPIQTGFPSDSDSRFVFSKLDSLSLRRQIPISISNSVLHSSLPAAKSLGLNVEVSESGMCSLNFRDEKTVTGAPELLCKTLYAWEAAISPHLAAERENATVEDSVVLQMIEKCLKEEMECGVKSEKSDLLCLVETAGGVASPGPSGTLQCDLYRPFRLPGILVGDGRLGGISGTIAAYESLKLRGYDIAAVVFEDHGLVNEVPLTSYLRNKVPVLVLPPVPKDPSDDLIEWFVESDGVFKALKETMVLANLERLERLNGMAKLAGEVFWWPFTQHKLVHQETVTVIDSRCGENFSIYKASDNSSLSQQFDACASWWTQGPDPTFQAELAREMGYTAARFGHVMFPENVYEPALKCAELLLDGVGKGWASRVYFSDNGSTAIEIALKMAFRKFCVDHNFCEATEEEKHIVVKVIALRGSYHGDTLGAMEAQAPSPYTGFLQFPWYTGRGLFLDPPTVFLSNGSWNISLPESFSEIAPEYGTFTSRDEIFDKSRDASTLARIYSAYLSKHLQEHSGVRQSAHVGALIIEPVIHGAGGMHMVDPLFQRVLVNECRNRKIPVIFDEVFTGFWRLGVETTTELLGCKPDIACFAKLLTGGMVPLAVTLATDAVFDSFSGDSKLKALLHGHSYSAHAMGCATAAKAIQWFKDPETNHNITSQGKTLRELWDEELVQQISSHSAVQRVVVIGTLFALELKADASNSGYASLYAKSLLIMLREDGIFTRPLGNVIYLMCGPCTSPEICRRLLTKLYKRLGEFNRT

SEQ ID NO: 382 - protein, 812 aa, synthetic construct
  source 1..812: note = Arabidopsis thaliana BioDA DELTAMTP protein Q517M (SEQ ID NO:
MKSTSVSPFHLPLNHPTYLIWSANTSLGKTLVSTGIAASFLLQQPSSSATKLLYLKPIQTGFPSDSDSRFVFSKLDSLSLRRQIPISISNSVLHSSLPAAKSLGLNVEVSESGMCSLNFRDEKTVTGAPELLCKTLYAWEAAISPHLAAERENATVEDSVVLQMIEKCLKEEMECGVKSEKSDLLCLVETAGGVASPGPSGTLQCDLYRPFRLPGILVGDGRLGGISGTIAAYESLKLRGYDIAAVVFEDHGLVNEVPLTSYLRNKVPVLVLPPVPKDPSDDLIEWFVESDGVFKALKETMVLANLERLERLNGMAKLAGEVFWWPFTQHKLVHQETVTVIDSRCGENFSIYKASDNSSLSQQFDACASWWTQGPDPTFQAELAREMGYTAARFGHVMFPENVYEPALKCAELLLDGVGKGWASRVYFSDNGSTAIEIALKMAFRKFCVDHNFCEATEEEKHIVVKVIALRGSYHGDTLGAMEAQAPSPYTGFLQMPWYTGRGLFLDPPTVFLSNGSWNISLPESFSEIAPEYGTFTSRDEIFDKSRDASTLARIYSAYLSKHLQEHSGVRQSAHVGALIIEPVIHGAGGMHMVDPLFQRVLVNECRNRKIPVIFDEVFTGFWRLGVETTTELLGCKPDIACFAKLLTGGMVPLAVTLATDAVFDSFSGDSKLKALLHGHSYSAHAMGCATAAKAIQWFKDPETNHNITSQGKTLRELWDEELVQQISSHSAVQRVVVIGTLFALELKADASNSGYASLYAKSLLIMLREDGIFTRPLGNVIYLMCGPCTSPEICRRLLTKLYKRLGEFNRT

SEQ ID NO: 383 - protein, 812 aa, synthetic construct
  source 1..812: note = Arabidopsis thaliana BioDA DELTAMTP protein Q517T (SEQ ID NO:
MKSTSVSPFHLPLNHPTYLIWSANTSLGKTLVSTGIAASFLLQQPSSSATKLLYLKPIQTGFPSDSDSRFVFSKLDSLSLRRQIPISISNSVLHSSLPAAKSLGLNVEVSESGMCSLNFRDEKTVTGAPELLCKTLYAWEAAISPHLAAERENATVEDSVVLQMIEKCLKEEMECGVKSEKSDLLCLVETAGGVASPGPSGTLQCDLYRPFRLPGILVGDGRLGGISGTIAAYESLKLRGYDIAAVVFEDHGLVNEVPLTSYLRNKVPVLVLPPVPKDPSDDLIEWFVESDGVFKALKETMVLANLERLERLNGMAKLAGEVFWWPFTQHKLVHQETVTVIDSRCGENFSIYKASDNSSLSQQFDACASWWTQGPDPTFQAELAREMGYTAARFGHVMFPENVYEPALKCAELLLDGVGKGWASRVYFSDNGSTAIEIALKMAFRKFCVDHNFCEATEEEKHIVVKVIALRGSYHGDTLGAMEAQAPSPYTGFLQTPWYTGRGLFLDPPTVFLSNGSWNISLPESFSEIAPEYGTFTSRDEIFDKSRDASTLARIYSAYLSKHLQEHSGVRQSAHVGALIIEPVIHGAGGMHMVDPLFQRVLVNECRNRKIPVIFDEVFTGFWRLGVETTTELLGCKPDIACFAKLLTGGMVPLAVTLATDAVFDSFSGDSKLKALLHGHSYSAHAMGCATAAKAIQWFKDPETNHNITSQGKTLRELWDEELVQQISSHSAVQRVVVIGTLFALELKADASNSGYASLYAKSLLIMLREDGIFTRPLGNVIYLMCGPCTSPEICRRLLTKLYKRLGEFNRT

SEQ ID NO: 384 - protein, 812 aa, synthetic construct
  source 1..812: note = Arabidopsis thaliana BioDA DELTAMTP protein Q517Y (SEQ ID NO:
MKSTSVSPFHLPLNHPTYLIWSANTSLGKTLVSTGIAASFLLQQPSSSATKLLYLKPIQTGFPSDSDSRFVFSKLDSLSLRRQIPISISNSVLHSSLPAAKSLGLNVEVSESGMCSLNFRDEKTVTGAPELLCKTLYAWEAAISPHLAAERENATVEDSVVLQMIEKCLKEEMECGVKSEKSDLLCLVETAGGVASPGPSGTLQCDLYRPFRLPGILVGDGRLGGISGTIAAYESLKLRGYDIAAVVFEDHGLVNEVPLTSYLRNKVPVLVLPPVPKDPSDDLIEWFVESDGVFKALKETMVLANLERLERLNGMAKLAGEVFWWPFTQHKLVHQETVTVIDSRCGENFSIYKASDNSSLSQQFDACASWWTQGPDPTFQAELAREMGYTAARFGHVMFPENVYEPALKCAELLLDGVGKGWASRVYFSDNGSTAIEIALKMAFRKFCVDHNFCEATEEEKHIVVKVIALRGSYHGDTLGAMEAQAPSPYTGFLQYPWYTGRGLFLDPPTVFLSNGSWNISLPESFSEIAPEYGTFTSRDEIFDKSRDASTLARIYSAYLSKHLQEHSGVRQSAHVGALIIEPVIHGAGGMHMVDPLFQRVLVNECRNRKIPVIFDEVFTGFWRLGVETTTELLGCKPDIACFAKLLTGGMVPLAVTLATDAVFDSFSGDSKLKALLHGHSYSAHAMGCATAAKAIQWFKDPETNHNITSQGKTLRELWDEELVQQISSHSAVQRVVVIGTLFALELKADASNSGYASLYAKSLLIMLREDGIFTRPLGNVIYLMCGPCTSPEICRRLLTKLYKRLGEFNRT

SEQ ID NO: 385 - protein, 812 aa, synthetic construct
  source 1..812: note = Arabidopsis thaliana BioDA DELTAMTP protein R756S (SEQ ID NO:
MKSTSVSPFHLPLNHPTYLIWSANTSLGKTLVSTGIAASFLLQQPSSSATKLLYLKPIQTGFPSDSDSRFVFSKLDSLSLRRQIPISISNSVLHSSLPAAKSLGLNVEVSESGMCSLNFRDEKTVTGAPELLCKTLYAWEAAISPHLAAERENATVEDSVVLQMIEKCLKEEMECGVKSEKSDLLCLVETAGGVASPGPSGTLQCDLYRPFRLPGILVGDGRLGGISGTIAAYESLKLRGYDIAAVVFEDHGLVNEVPLTSYLRNKVPVLVLPPVPKDPSDDLIEWFVESDGVFKALKETMVLANLERLERLNGMAKLAGEVFWWPFTQHKLVHQETVTVIDSRCGENFSIYKASDNSSLSQQFDACASWWTQGPDPTFQAELAREMGYTAARFGHVMFPENVYEPALKCAELLLDGVGKGWASRVYFSDNGSTAIEIALKMAFRKFCVDHNFCEATEEEKHIVVKVIALRGSYHGDTLGAMEAQAPSPYTGFLQQPWYTGRGLFLDPPTVFLSNGSWNISLPESFSEIAPEYGTFTSRDEIFDKSRDASTLARIYSAYLSKHLQEHSGVRQSAHVGALIIEPVIHGAGGMHMVDPLFQRVLVNECRNRKIPVIFDEVFTGFWRLGVETTTELLGCKPDIACFAKLLTGGMVPLAVTLATDAVFDSFSGDSKLKALLHGHSYSAHAMGCATAAKAIQWFKDPETNHNITSQGKTLRELWDEELVQQISSHSAVQSVVVIGTLFALELKADASNSGYASLYAKSLLIMLREDGIFTRPLGNVIYLMCGPCTSPEICRRLLTKLYKRLGEFNRT

SEQ ID NO: 386 - protein, 812 aa, synthetic construct
  source 1..812: note = Arabidopsis thaliana BioDA DELTAMTP protein S509C (SEQ ID NO:
MKSTSVSPFHLPLNHPTYLIWSANTSLGKTLVSTGIAASFLLQQPSSSATKLLYLKPIQTGFPSDSDSRFVFSKLDSLSLRRQIPISISNSVLHSSLPAAKSLGLNVEVSESGMCSLNFRDEKTVTGAPELLCKTLYAWEAAISPHLAAERENATVEDSVVLQMIEKCLKEEMECGVKSEKSDLLCLVETAGGVASPGPSGTLQCDLYRPFRLPGILVGDGRLGGISGTIAAYESLKLRGYDIAAVVFEDHGLVNEVPLTSYLRNKVPVLVLPPVPKDPSDDLIEWFVESDGVFKALKETMVLANLERLERLNGMAKLAGEVFWWPFTQHKLVHQETVTVIDSRCGENFSIYKASDNSSLSQQFDACASWWTQGPDPTFQAELAREMGYTAARFGHVMFPENVYEPALKCAELLLDGVGKGWASRVYFSDNGSTAIEIALKMAFRKFCVDHNFCEATEEEKHIVVKVIALRGSYHGDTLGAMEAQAPCPYTGFLQQPWYTGRGLFLDPPTVFLSNGSWNISLPESFSEIAPEYGTFTSRDEIFDKSRDASTLARIYSAYLSKHLQEHSGVRQSAHVGALIIEPVIHGAGGMHMVDPLFQRVLVNECRNRKIPVIFDEVFTGFWRLGVETTTELLGCKPDIACFAKLLTGGMVPLAVTLATDAVFDSFSGDSKLKALLHGHSYSAHAMGCATAAKAIQWFKDPETNHNITSQGKTLRELWDEELVQQISSHSAVQRVVVIGTLFALELKADASNSGYASLYAKSLLIMLREDGIFTRPLGNVIYLMCGPCTSPEICRRLLTKLYKRLGEFNRT

SEQ ID NO: 387 - protein, 812 aa, synthetic construct
  source 1..812: note = Arabidopsis thaliana BioDA DELTAMTP protein S509D (SEQ ID NO:
MKSTSVSPFHLPLNHPTYLIWSANTSLGKTLVSTGIAASFLLQQPSSSATKLLYLKPIQTGFPSDSDSRFVFSKLDSLSLRRQIPISISNSVLHSSLPAAKSLGLNVEVSESGMCSLNFRDEKTVTGAPELLCKTLYAWEAAISPHLAAERENATVEDSVVLQMIEKCLKEEMECGVKSEKSDLLCLVETAGGVASPGPSGTLQCDLYRPFRLPGILVGDGRLGGISGTIAAYESLKLRGYDIAAVVFEDHGLVNEVPLTSYLRNKVPVLVLPPVPKDPSDDLIEWFVESDGVFKALKETMVLANLERLERLNGMAKLAGEVFWWPFTQHKLVHQETVTVIDSRCGENFSIYKASDNSSLSQQFDACASWWTQGPDPTFQAELAREMGYTAARFGHVMFPENVYEPALKCAELLLDGVGKGWASRVYFSDNGSTAIEIALKMAFRKFCVDHNFCEATEEEKHIVVKVIALRGSYHGDTLGAMEAQAPDPYTGFLQQPWYTGRGLFLDPPTVFLSNGSWNISLPESFSEIAPEYGTFTSRDEIFDKSRDASTLARIYSAYLSKHLQEHSGVRQSAHVGALIIEPVIHGAGGMHMVDPLFQRVLVNECRNRKIPVIFDEVFTGFWRLGVETTTELLGCKPDIACFAKLLTGGMVPLAVTLATDAVFDSFSGDSKLKALLHGHSYSAHAMGCATAAKAIQWFKDPETNHNITSQGKTLRELWDEELVQQISSHSAVQRVVVIGTLFALELKADASNSGYASLYAKSLLIMLREDGIFTRPLGNVIYLMCGPCTSPEICRRLLTKLYKRLGEFNRT

SEQ ID NO: 388 - protein, 812 aa, synthetic construct
  source 1..812: note = Arabidopsis thaliana BioDA DELTAMTP protein S509E (SEQ ID NO:
MKSTSVSPFHLPLNHPTYLIWSANTSLGKTLVSTGIAASFLLQQPSSSATKLLYLKPIQTGFPSDSDSRFVFSKLDSLSLRRQIPISISNSVLHSSLPAAKSLGLNVEVSESGMCSLNFRDEKTVTGAPELLCKTLYAWEAAISPHLAAERENATVEDSVVLQMIEKCLKEEMECGVKSEKSDLLCLVETAGGVASPGPSGTLQCDLYRPFRLPGILVGDGRLGGISGTIAAYESLKLRGYDIAAVVFEDHGLVNEVPLTSYLRNKVPVLVLPPVPKDPSDDLIEWFVESDGVFKALKETMVLANLERLERLNGMAKLAGEVFWWPFTQHKLVHQETVTVIDSRCGENFSIYKASDNSSLSQQFDACASWWTQGPDPTFQAELAREMGYTAARFGHVMFPENVYEPALKCAELLLDGVGKGWASRVYFSDNGSTAIEIALKMAFRKFCVDHNFCEATEEEKHIVVKVIALRGSYHGDTLGAMEAQAPEPYTGFLQQPWYTGRGLFLDPPTVFLSNGSWNISLPESFSEIAPEYGTFTSRDEIFDKSRDASTLARIYSAYLSKHLQEHSGVRQSAHVGALIIEPVIHGAGGMHMVDPLFQRVLVNECRNRKIPVIFDEVFTGFWRLGVETTTELLGCKPDIACFAKLLTGGMVPLAVTLATDAVFDSFSGDSKLKALLHGHSYSAHAMGCATAAKAIQWFKDPETNHNITSQGKTLRELWDEELVQQISSHSAVQRVVVIGTLFALELKADASNSGYASLYAKSLLIMLREDGIFTRPLGNVIYLMCGPCTSPEICRRLLTKLYKRLGEFNRT

SEQ ID NO: 389 - protein, 812 aa, synthetic construct
  source 1..812: note = Arabidopsis thaliana BioDA DELTAMTP protein S509G (SEQ ID NO:
MKSTSVSPFHLPLNHPTYLIWSANTSLGKTLVSTGIAASFLLQQPSSSATKLLYLKPIQTGFPSDSDSRFVFSKLDSLSLRRQIPISISNSVLHSSLPAAKSLGLNVEVSESGMCSLNFRDEKTVTGAPELLCKTLYAWEAAISPHLAAERENATVEDSVVLQMIEKCLKEEMECGVKSEKSDLLCLVETAGGVASPGPSGTLQCDLYRPFRLPGILVGDGRLGGISGTIAAYESLKLRGYDIAAVVFEDHGLVNEVPLTSYLRNKVPVLVLPPVPKDPSDDLIEWFVESDGVFKALKETMVLANLERLERLNGMAKLAGEVFWWPFTQHKLVHQETVTVIDSRCGENFSIYKASDNSSLSQQFDACASWWTQGPDPTFQAELAREMGYTAARFGHVMFPENVYEPALKCAELLLDGVGKGWASRVYFSDNGSTAIEIALKMAFRKFCVDHNFCEATEEEKHIVVKVIALRGSYHGDTLGAMEAQAPGPYTGFLQQPWYTGRGLFLDPPTVFLSNGSWNISLPESFSEIAPEYGTFTSRDEIFDKSRDASTLARIYSAYLSKHLQEHSGVRQSAHVGALIIEPVIHGAGGMHMVDPLFQRVLVNECRNRKIPVIFDEVFTGFWRLGVETTTELLGCKPDIACFAKLLTGGMVPLAVTLATDAVFDSFSGDSKLKALLHGHSYSAHAMGCATAAKAIQWFKDPETNHNITSQGKTLRELWDEELVQQISSHSAVQRVVVIGTLFALELKADASNSGYASLYAKSLLIMLREDGIFTRPLGNVIYLMCGPCTSPEICRRLLTKLYKRLGEFNRT

SEQ ID NO: 390 - protein, 812 aa, synthetic construct
  source 1..812: note = Arabidopsis thaliana BioDA DELTAMTP protein S509V (SEQ ID NO:
MKSTSVSPFHLPLNHPTYLIWSANTSLGKTLVSTGIAASFLLQQPSSSATKLLYLKPIQTGFPSDSDSRFVFSKLDSLSLRRQIPISISNSVLHSSLPAAKSLGLNVEVSESGMCSLNFRDEKTVTGAPELLCKTLYAWEAAISPHLAAERENATVEDSVVLQMIEKCLKEEMECGVKSEKSDLLCLVETAGGVASPGPSGTLQCDLYRPFRLPGILVGDGRLGGISGTIAAYESLKLRGYDIAAVVFEDHGLVNEVPLTSYLRNKVPVLVLPPVPKDPSDDLIEWFVESDGVFKALKETMVLANLERLERLNGMAKLAGEVFWWPFTQHKLVHQETVTVIDSRCGENFSIYKASDNSSLSQQFDACASWWTQGPDPTFQAELAREMGYTAARFGHVMFPENVYEPALKCAELLLDGVGKGWASRVYFSDNGSTAIEIALKMAFRKFCVDHNFCEATEEEKHIVVKVIALRGSYHGDTLGAMEAQAPVPYTGFLQQPWYTGRGLFLDPPTVFLSNGSWNISLPESFSEIAPEYGTFTSRDEIFDKSRDASTLARIYSAYLSKHLQEHSGVRQSAHVGALIIEPVIHGAGGMHMVDPLFQRVLVNECRNRKIPVIFDEVFTGFWRLGVETTTELLGCKPDIACFAKLLTGGMVPLAVTLATDAVFDSFSGDSKLKALLHGHSYSAHAMGCATAAKAIQWFKDPETNHNITSQGKTLRELWDEELVQQISSHSAVQRVVVIGTLFALELKADASNSGYASLYAKSLLIMLREDGIFTRPLGNVIYLMCGPCTSPEICRRLLTKLYKRLGEFNRT

SEQ ID NO: 391 - protein, 812 aa, synthetic construct
  source 1..812: note = Arabidopsis thaliana BioDA DELTAMTP protein S509W (SEQ ID NO:
MKSTSVSPFHLPLNHPTYLIWSANTSLGKTLVSTGIAASFLLQQPSSSATKLLYLKPIQTGFPSDSDSRFVFSKLDSLSLRRQIPISISNSVLHSSLPAAKSLGLNVEVSESGMCSLNFRDEKTVTGAPELLCKTLYAWEAAISPHLAAERENATVEDSVVLQMIEKCLKEEMECGVKSEKSDLLCLVETAGGVASPGPSGTLQCDLYRPFRLPGILVGDGRLGGISGTIAAYESLKLRGYDIAAVVFEDHGLVNEVPLTSYLRNKVPVLVLPPVPKDPSDDLIEWFVESDGVFKALKETMVLANLERLERLNGMAKLAGEVFWWPFTQHKLVHQETVTVIDSRCGENFSIYKASDNSSLSQQFDACASWWTQGPDPTFQAELAREMGYTAARFGHVMFPENVYEPALKCAELLLDGVGKGWASRVYFSDNGSTAIEIALKMAFRKFCVDHNFCEATEEEKHIVVKVIALRGSYHGDTLGAMEAQAPWPYTGFLQQPWYTGRGLFLDPPTVFLSNGSWNISLPESFSEIAPEYGTFTSRDEIFDKSRDASTLARIYSAYLSKHLQEHSGVRQSAHVGALIIEPVIHGAGGMHMVDPLFQRVLVNECRNRKIPVIFDEVFTGFWRLGVETTTELLGCKPDIACFAKLLTGGMVPLAVTLATDAVFDSFSGDSKLKALLHGHSYSAHAMGCATAAKAIQWFKDPETNHNITSQGKTLRELWDEELVQQISSHSAVQRVVVIGTLFALELKADASNSGYASLYAKSLLIMLREDGIFTRPLGNVIYLMCGPCTSPEICRRLLTKLYKRLGEFNRT

SEQ ID NO: 392 - protein, 812 aa, synthetic construct
  source 1..812: note = Arabidopsis thaliana BioDA DELTAMTP protein S704H (SEQ ID NO:
MKSTSVSPFHLPLNHPTYLIWSANTSLGKTLVSTGIAASFLLQQPSSSATKLLYLKPIQTGFPSDSDSRFVFSKLDSLSLRRQIPISISNSVLHSSLPAAKSLGLNVEVSESGMCSLNFRDEKTVTGAPELLCKTLYAWEAAISPHLAAERENATVEDSVVLQMIEKCLKEEMECGVKSEKSDLLCLVETAGGVASPGPSGTLQCDLYRPFRLPGILVGDGRLGGISGTIAAYESLKLRGYDIAAVVFEDHGLVNEVPLTSYLRNKVPVLVLPPVPKDPSDDLIEWFVESDGVFKALKETMVLANLERLERLNGMAKLAGEVFWWPFTQHKLVHQETVTVIDSRCGENFSIYKASDNSSLSQQFDACASWWTQGPDPTFQAELAREMGYTAARFGHVMFPENVYEPALKCAELLLDGVGKGWASRVYFSDNGSTAIEIALKMAFRKFCVDHNFCEATEEEKHIVVKVIALRGSYHGDTLGAMEAQAPSPYTGFLQQPWYTGRGLFLDPPTVFLSNGSWNISLPESFSEIAPEYGTFTSRDEIFDKSRDASTLARIYSAYLSKHLQEHSGVRQSAHVGALIIEPVIHGAGGMHMVDPLFQRVLVNECRNRKIPVIFDEVFTGFWRLGVETTTELLGCKPDIACFAKLLTGGMVPLAVTLATDAVFDSFSGDSKLKALLHGHSYHAHAMGCATAAKAIQWFKDPETNHNITSQGKTLRELWDEELVQQISSHSAVQRVVVIGTLFALELKADASNSGYASLYAKSLLIMLREDGIFTRPLGNVIYLMCGPCTSPEICRRLLTKLYKRLGEFNRT

SEQ ID NO: 393 - protein, 812 aa, synthetic construct
  source 1..812: note = Arabidopsis thaliana BioDA DELTAMTP protein T512C (SEQ ID NO:
MKSTSVSPFHLPLNHPTYLIWSANTSLGKTLVSTGIAASFLLQQPSSSATKLLYLKPIQTGFPSDSDSRFVFSKLDSLSLRRQIPISISNSVLHSSLPAAKSLGLNVEVSESGMCSLNFRDEKTVTGAPELLCKTLYAWEAAISPHLAAERENATVEDSVVLQMIEKCLKEEMECGVKSEKSDLLCLVETAGGVASPGPSGTLQCDLYRPFRLPGILVGDGRLGGISGTIAAYESLKLRGYDIAAVVFEDHGLVNEVPLTSYLRNKVPVLVLPPVPKDPSDDLIEWFVESDGVFKALKETMVLANLERLERLNGMAKLAGEVFWWPFTQHKLVHQETVTVIDSRCGENFSIYKASDNSSLSQQFDACASWWTQGPDPTFQAELAREMGYTAARFGHVMFPENVYEPALKCAELLLDGVGKGWASRVYFSDNGSTAIEIALKMAFRKFCVDHNFCEATEEEKHIVVKVIALRGSYHGDTLGAMEAQAPSPYCGFLQQPWYTGRGLFLDPPTVFLSNGSWNISLPESFSEIAPEYGTFTSRDEIFDKSRDASTLARIYSAYLSKHLQEHSGVRQSAHVGALIIEPVIHGAGGMHMVDPLFQRVLVNECRNRKIPVIFDEVFTGFWRLGVETTTELLGCKPDIACFAKLLTGGMVPLAVTLATDAVFDSFSGDSKLKALLHGHSYSAHAMGCATAAKAIQWFKDPETNHNITSQGKTLRELWDEELVQQISSHSAVQRVVVIGTLFALELKADASNSGYASLYAKSLLIMLREDGIFTRPLGNVIYLMCGPCTSPEICRRLLTKLYKRLGEFNRT

SEQ ID NO: 394 - protein, 812 aa, synthetic construct
  source 1..812: note = Arabidopsis thaliana BioDA DELTAMTP protein T512D (SEQ ID NO:
MKSTSVSPFHLPLNHPTYLIWSANTSLGKTLVSTGIAASFLLQQPSSSATKLLYLKPIQTGFPSDSDSRFVFSKLDSLSLRRQIPISISNSVLHSSLPAAKSLGLNVEVSESGMCSLNFRDEKTVTGAPELLCKTLYAWEAAISPHLAAERENATVEDSVVLQMIEKCLKEEMECGVKSEKSDLLCLVETAGGVASPGPSGTLQCDLYRPFRLPGILVGDGRLGGISGTIAAYESLKLRGYDIAAVVFEDHGLVNEVPLTSYLRNKVPVLVLPPVPKDPSDDLIEWFVESDGVFKALKETMVLANLERLERLNGMAKLAGEVFWWPFTQHKLVHQETVTVIDSRCGENFSIYKASDNSSLSQQFDACASWWTQGPDPTFQAELAREMGYTAARFGHVMFPENVYEPALKCAELLLDGVGKGWASRVYFSDNGSTAIEIALKMAFRKFCVDHNFCEATEEEKHIVVKVIALRGSYHGDTLGAMEAQAPSPYDGFLQQPWYTGRGLFLDPPTVFLSNGSWNISLPESFSEIAPEYGTFTSRDEIFDKSRDASTLARIYSAYLSKHLQEHSGVRQSAHVGALIIEPVIHGAGGMHMVDPLFQRVLVNECRNRKIPVIFDEVFTGFWRLGVETTTELLGCKPDIACFAKLLTGGMVPLAVTLATDAVFDSFSGDSKLKALLHGHSYSAHAMGCATAAKAIQWFKDPETNHNITSQGKTLRELWDEELVQQISSHSAVQRVVVIGTLFALELKADASNSGYASLYAKSLLIMLREDGIFTRPLGNVIYLMCGPCTSPEICRRLLTKLYKRLGEFNRT

SEQ ID NO: 395 - protein, 812 aa, synthetic construct
  source 1..812: note = Arabidopsis thaliana BioDA DELTAMTP protein T512Q (SEQ ID NO:
MKSTSVSPFHLPLNHPTYLIWSANTSLGKTLVSTGIAASFLLQQPSSSATKLLYLKPIQTGFPSDSDSRFVFSKLDSLSLRRQIPISISNSVLHSSLPAAKSLGLNVEVSESGMCSLNFRDEKTVTGAPELLCKTLYAWEAAISPHLAAERENATVEDSVVLQMIEKCLKEEMECGVKSEKSDLLCLVETAGGVASPGPSGTLQCDLYRPFRLPGILVGDGRLGGISGTIAAYESLKLRGYDIAAVVFEDHGLVNEVPLTSYLRNKVPVLVLPPVPKDPSDDLIEWFVESDGVFKALKETMVLANLERLERLNGMAKLAGEVFWWPFTQHKLVHQETVTVIDSRCGENFSIYKASDNSSLSQQFDACASWWTQGPDPTFQAELAREMGYTAARFGHVMFPENVYEPALKCAELLLDGVGKGWASRVYFSDNGSTAIEIALKMAFRKFCVDHNFCEATEEEKHIVVKVIALRGSYHGDTLGAMEAQAPSPYQGFLQQPWYTGRGLFLDPPTVFLSNGSWNISLPESFSEIAPEYGTFTSRDEIFDKSRDASTLARIYSAYLSKHLQEHSGVRQSAHVGALIIEPVIHGAGGMHMVDPLFQRVLVNECRNRKIPVIFDEVFTGFWRLGVETTTELLGCKPDIACFAKLLTGGMVPLAVTLATDAVFDSFSGDSKLKALLHGHSYSAHAMGCATAAKAIQWFKDPETNHNITSQGKTLRELWDEELVQQISSHSAVQRVVVIGTLFALELKADASNSGYASLYAKSLLIMLREDGIFTRPLGNVIYLMCGPCTSPEICRRLLTKLYKRLGEFNRT

SEQ ID NO: 396 - protein, 812 aa, synthetic construct
  source 1..812: note = Arabidopsis thaliana BioDA DELTAMTP protein T512R (SEQ ID NO:
MKSTSVSPFHLPLNHPTYLIWSANTSLGKTLVSTGIAASFLLQQPSSSATKLLYLKPIQTGFPSDSDSRFVFSKLDSLSLRRQIPISISNSVLHSSLPAAKSLGLNVEVSESGMCSLNFRDEKTVTGAPELLCKTLYAWEAAISPHLAAERENATVEDSVVLQMIEKCLKEEMECGVKSEKSDLLCLVETAGGVASPGPSGTLQCDLYRPFRLPGILVGDGRLGGISGTIAAYESLKLRGYDIAAVVFEDHGLVNEVPLTSYLRNKVPVLVLPPVPKDPSDDLIEWFVESDGVFKALKETMVLANLERLERLNGMAKLAGEVFWWPFTQHKLVHQETVTVIDSRCGENFSIYKASDNSSLSQQFDACASWWTQGPDPTFQAELAREMGYTAARFGHVMFPENVYEPALKCAELLLDGVGKGWASRVYFSDNGSTAIEIALKMAFRKFCVDHNFCEATEEEKHIVVKVIALRGSYHGDTLGAMEAQAPSPYRGFLQQPWYTGRGLFLDPPTVFLSNGSWNISLPESFSEIAPEYGTFTSRDEIFDKSRDASTLARIYSAYLSKHLQEHSGVRQSAHVGALIIEPVIHGAGGMHMVDPLFQRVLVNECRNRKIPVIFDEVFTGFWRLGVETTTELLGCKPDIACFAKLLTGGMVPLAVTLATDAVFDSFSGDSKLKALLHGHSYSAHAMGCATAAKAIQWFKDPETNHNITSQGKTLRELWDEELVQQISSHSAVQRVVVIGTLFALELKADASNSGYASLYAKSLLIMLREDGIFTRPLGNVIYLMCGPCTSPEICRRLLTKLYKRLGEFNRT

SEQ ID NO: 397 - protein, 812 aa, synthetic construct
  source 1..812: note = Arabidopsis thaliana BioDA DELTAMTP protein T512V (SEQ ID NO:
MKSTSVSPFHLPLNHPTYLIWSANTSLGKTLVSTGIAASFLLQQPSSSATKLLYLKPIQTGFPSDSDSRFVFSKLDSLSLRRQIPISISNSVLHSSLPAAKSLGLNVEVSESGMCSLNFRDEKTVTGAPELLCKTLYAWEAAISPHLAAERENATVEDSVVLQMIEKCLKEEMECGVKSEKSDLLCLVETAGGVASPGPSGTLQCDLYRPFRLPGILVGDGRLGGISGTIAAYESLKLRGYDIAAVVFEDHGLVNEVPLTSYLRNKVPVLVLPPVPKDPSDDLIEWFVESDGVFKALKETMVLANLERLERLNGMAKLAGEVFWWPFTQHKLVHQETVTVIDSRCGENFSIYKASDNSSLSQQFDACASWWTQGPDPTFQAELAREMGYTAARFGHVMFPENVYEPALKCAELLLDGVGKGWASRVYFSDNGSTAIEIALKMAFRKFCVDHNFCEATEEEKHIVVKVIALRGSYHGDTLGAMEAQAPSPYVGFLQQPWYTGRGLFLDPPTVFLSNGSWNISLPESFSEIAPEYGTFTSRDEIFDKSRDASTLARIYSAYLSKHLQEHSGVRQSAHVGALIIEPVIHGAGGMHMVDPLFQRVLVNECRNRKIPVIFDEVFTGFWRLGVETTTELLGCKPDIACFAKLLTGGMVPLAVTLATDAVFDSFSGDSKLKALLHGHSYSAHAMGCATAAKAIQWFKDPETNHNITSQGKTLRELWDEELVQQISSHSAVQRVVVIGTLFALELKADASNSGYASLYAKSLLIMLREDGIFTRPLGNVIYLMCGPCTSPEICRRLLTKLYKRLGEFNRT

SEQ ID NO: 398 - protein, 812 aa, synthetic construct
  source 1..812: note = Arabidopsis thaliana BioDA DELTAMTP protein W391L (SEQ ID NO:
MKSTSVSPFHLPLNHPTYLIWSANTSLGKTLVSTGIAASFLLQQPSSSATKLLYLKPIQTGFPSDSDSRFVFSKLDSLSLRRQIPISISNSVLHSSLPAAKSLGLNVEVSESGMCSLNFRDEKTVTGAPELLCKTLYAWEAAISPHLAAERENATVEDSVVLQMIEKCLKEEMECGVKSEKSDLLCLVETAGGVASPGPSGTLQCDLYRPFRLPGILVGDGRLGGISGTIAAYESLKLRGYDIAAVVFEDHGLVNEVPLTSYLRNKVPVLVLPPVPKDPSDDLIEWFVESDGVFKALKETMVLANLERLERLNGMAKLAGEVFWWPFTQHKLVHQETVTVIDSRCGENFSIYKASDNSSLSQQFDACASLWTQGPDPTFQAELAREMGYTAARFGHVMFPENVYEPALKCAELLLDGVGKGWASRVYFSDNGSTAIEIALKMAFRKFCVDHNFCEATEEEKHIVVKVIALRGSYHGDTLGAMEAQAPSPYTGFLQQPWYTGRGLFLDPPTVFLSNGSWNISLPESFSEIAPEYGTFTSRDEIFDKSRDASTLARIYSAYLSKHLQEHSGVRQSAHVGALIIEPVIHGAGGMHMVDPLFQRVLVNECRNRKIPVIFDEVFTGFWRLGVETTTELLGCKPDIACFAKLLTGGMVPLAVTLATDAVFDSFSGDSKLKALLHGHSYSAHAMGCATAAKAIQWFKDPETNHNITSQGKTLRELWDEELVQQISSHSAVQRVVVIGTLFALELKADASNSGYASLYAKSLLIMLREDGIFTRPLGNVIYLMCGPCTSPEICRRLLTKLYKRLGEFNRT

SEQ ID NO: 399 - protein, 812 aa, synthetic construct
  source 1..812: note = Arabidopsis thaliana BioDA DELTAMTP protein W391M (SEQ ID NO:
MKSTSVSPFHLPLNHPTYLIWSANTSLGKTLVSTGIAASFLLQQPSSSATKLLYLKPIQTGFPSDSDSRFVFSKLDSLSLRRQIPISISNSVLHSSLPAAKSLGLNVEVSESGMCSLNFRDEKTVTGAPELLCKTLYAWEAAISPHLAAERENATVEDSVVLQMIEKCLKEEMECGVKSEKSDLLCLVETAGGVASPGPSGTLQCDLYRPFRLPGILVGDGRLGGISGTIAAYESLKLRGYDIAAVVFEDHGLVNEVPLTSYLRNKVPVLVLPPVPKDPSDDLIEWFVESDGVFKALKETMVLANLERLERLNGMAKLAGEVFWWPFTQHKLVHQETVTVIDSRCGENFSIYKASDNSSLSQQFDACASMWTQGPDPTFQAELAREMGYTAARFGHVMFPENVYEPALKCAELLLDGVGKGWASRVYFSDNGSTAIEIALKMAFRKFCVDHNFCEATEEEKHIVVKVIALRGSYHGDTLGAMEAQAPSPYTGFLQQPWYTGRGLFLDPPTVFLSNGSWNISLPESFSEIAPEYGTFTSRDEIFDKSRDASTLARIYSAYLSKHLQEHSGVRQSAHVGALIIEPVIHGAGGMHMVDPLFQRVLVNECRNRKIPVIFDEVFTGFWRLGVETTTELLGCKPDIACFAKLLTGGMVPLAVTLATDAVFDSFSGDSKLKALLHGHSYSAHAMGCATAAKAIQWFKDPETNHNITSQGKTLRELWDEELVQQISSHSAVQRVVVIGTLFALELKADASNSGYASLYAKSLLIMLREDGIFTRPLGNVIYLMCGPCTSPEICRRLLTKLYKRLGEFNRT

SEQ ID NO: 400 - protein, 812 aa, synthetic construct
  source 1..812: note = Arabidopsis thaliana BioDA DELTAMTP protein W392A (SEQ ID NO:
MKSTSVSPFHLPLNHPTYLIWSANTSLGKTLVSTGIAASFLLQQPSSSATKLLYLKPIQTGFPSDSDSRFVFSKLDSLSLRRQIPISISNSVLHSSLPAAKSLGLNVEVSESGMCSLNFRDEKTVTGAPELLCKTLYAWEAAISPHLAAERENATVEDSVVLQMIEKCLKEEMECGVKSEKSDLLCLVETAGGVASPGPSGTLQCDLYRPFRLPGILVGDGRLGGISGTIAAYESLKLRGYDIAAVVFEDHGLVNEVPLTSYLRNKVPVLVLPPVPKDPSDDLIEWFVESDGVFKALKETMVLANLERLERLNGMAKLAGEVFWWPFTQHKLVHQETVTVIDSRCGENFSIYKASDNSSLSQQFDACASWATQGPDPTFQAELAREMGYTAARFGHVMFPENVYEPALKCAELLLDGVGKGWASRVYFSDNGSTAIEIALKMAFRKFCVDHNFCEATEEEKHIVVKVIALRGSYHGDTLGAMEAQAPSPYTGFLQQPWYTGRGLFLDPPTVFLSNGSWNISLPESFSEIAPEYGTFTSRDEIFDKSRDASTLARIYSAYLSKHLQEHSGVRQSAHVGALIIEPVIHGAGGMHMVDPLFQRVLVNECRNRKIPVIFDEVFTGFWRLGVETTTELLGCKPDIACFAKLLTGGMVPLAVTLATDAVFDSFSGDSKLKALLHGHSYSAHAMGCATAAKAIQWFKDPETNHNITSQGKTLRELWDEELVQQISSHSAVQRVVVIGTLFALELKADASNSGYASLYAKSLLIMLREDGIFTRPLGNVIYLMCGPCTSPEICRRLLTKLYKRLGEFNRT

SEQ ID NO: 401 - protein, 812 aa, synthetic construct
  source 1..812: note = Arabidopsis thaliana BioDA DELTAMTP protein W392G (SEQ ID NO:
MKSTSVSPFHLPLNHPTYLIWSANTSLGKTLVSTGIAASFLLQQPSSSATKLLYLKPIQTGFPSDSDSRFVFSKLDSLSLRRQIPISISNSVLHSSLPAAKSLGLNVEVSESGMCSLNFRDEKTVTGAPELLCKTLYAWEAAISPHLAAERENATVEDSVVLQMIEKCLKEEMECGVKSEKSDLLCLVETAGGVASPGPSGTLQCDLYRPFRLPGILVGDGRLGGISGTIAAYESLKLRGYDIAAVVFEDHGLVNEVPLTSYLRNKVPVLVLPPVPKDPSDDLIEWFVESDGVFKALKETMVLANLERLERLNGMAKLAGEVFWWPFTQHKLVHQETVTVIDSRCGENFSIYKASDNSSLSQQFDACASWGTQGPDPTFQAELAREMGYTAARFGHVMFPENVYEPALKCAELLLDGVGKGWASRVYFSDNGSTAIEIALKMAFRKFCVDHNFCEATEEEKHIVVKVIALRGSYHGDTLGAMEAQAPSPYTGFLQQPWYTGRGLFLDPPTVFLSNGSWNISLPESFSEIAPEYGTFTSRDEIFDKSRDASTLARIYSAYLSKHLQEHSGVRQSAHVGALIIEPVIHGAGGMHMVDPLFQRVLVNECRNRKIPVIFDEVFTGFWRLGVETTTELLGCKPDIACFAKLLTGGMVPLAVTLATDAVFDSFSGDSKLKALLHGHSYSAHAMGCATAAKAIQWFKDPETNHNITSQGKTLRELWDEELVQQISSHSAVQRVVVIGTLFALELKADASNSGYASLYAKSLLIMLREDGIFTRPLGNVIYLMCGPCTSPEICRRLLTKLYKRLGEFNRT

SEQ ID NO: 402 - protein, 812 aa, synthetic construct
  source 1..812: note = Arabidopsis thaliana BioDA DELTAMTP protein W392S (SEQ ID NO:
MKSTSVSPFHLPLNHPTYLIWSANTSLGKTLVSTGIAASFLLQQPSSSATKLLYLKPIQTGFPSDSDSRFVFSKLDSLSLRRQIPISISNSVLHSSLPAAKSLGLNVEVSESGMCSLNFRDEKTVTGAPELLCKTLYAWEAAISPHLAAERENATVEDSVVLQMIEKCLKEEMECGVKSEKSDLLCLVETAGGVASPGPSGTLQCDLYRPFRLPGILVGDGRLGGISGTIAAYESLKLRGYDIAAVVFEDHGLVNEVPLTSYLRNKVPVLVLPPVPKDPSDDLIEWFVESDGVFKALKETMVLANLERLERLNGMAKLAGEVFWWPFTQHKLVHQETVTVIDSRCGENFSIYKASDNSSLSQQFDACASWSTQGPDPTFQAELAREMGYTAARFGHVMFPENVYEPALKCAELLLDGVGKGWASRVYFSDNGSTAIEIALKMAFRKFCVDHNFCEATEEEKHIVVKVIALRGSYHGDTLGAMEAQAPSPYTGFLQQPWYTGRGLFLDPPTVFLSNGSWNISLPESFSEIAPEYGTFTSRDEIFDKSRDASTLARIYSAYLSKHLQEHSGVRQSAHVGALIIEPVIHGAGGMHMVDPLFQRVLVNECRNRKIPVIFDEVFTGFWRLGVETTTELLGCKPDIACFAKLLTGGMVPLAVTLATDAVFDSFSGDSKLKALLHGHSYSAHAMGCATAAKAIQWFKDPETNHNITSQGKTLRELWDEELVQQISSHSAVQRVVVIGTLFALELKADASNSGYASLYAKSLLIMLREDGIFTRPLGNVIYLMCGPCTSPEICRRLLTKLYKRLGEFNRT

SEQ ID NO: 403 - protein, 812 aa, synthetic construct
  source 1..812: note = Arabidopsis thaliana BioDA DELTAMTP protein Y511D (SEQ ID NO:
MKSTSVSPFHLPLNHPTYLIWSANTSLGKTLVSTGIAASFLLQQPSSSATKLLYLKPIQTGFPSDSDSRFVFSKLDSLSLRRQIPISISNSVLHSSLPAAKSLGLNVEVSESGMCSLNFRDEKTVTGAPELLCKTLYAWEAAISPHLAAERENATVEDSVVLQMIEKCLKEEMECGVKSEKSDLLCLVETAGGVASPGPSGTLQCDLYRPFRLPGILVGDGRLGGISGTIAAYESLKLRGYDIAAVVFEDHGLVNEVPLTSYLRNKVPVLVLPPVPKDPSDDLIEWFVESDGVFKALKETMVLANLERLERLNGMAKLAGEVFWWPFTQHKLVHQETVTVIDSRCGENFSIYKASDNSSLSQQFDACASWWTQGPDPTFQAELAREMGYTAARFGHVMFPENVYEPALKCAELLLDGVGKGWASRVYFSDNGSTAIEIALKMAFRKFCVDHNFCEATEEEKHIVVKVIALRGSYHGDTLGAMEAQAPSPDTGFLQQPWYTGRGLFLDPPTVFLSNGSWNISLPESFSEIAPEYGTFTSRDEIFDKSRDASTLARIYSAYLSKHLQEHSGVRQSAHVGALIIEPVIHGAGGMHMVDPLFQRVLVNECRNRKIPVIFDEVFTGFWRLGVETTTELLGCKPDIACFAKLLTGGMVPLAVTLATDAVFDSFSGDSKLKALLHGHSYSAHAMGCATAAKAIQWFKDPETNHNITSQGKTLRELWDEELVQQISSHSAVQRVVVIGTLFALELKADASNSGYASLYAKSLLIMLREDGIFTRPLGNVIYLMCGPCTSPEICRRLLTKLYKRLGEFNRT

SEQ ID NO: 404 - protein, 812 aa, synthetic construct
  source 1..812: note = Arabidopsis thaliana BioDA DELTAMTP protein Y511E (SEQ ID NO:
MKSTSVSPFHLPLNHPTYLIWSANTSLGKTLVSTGIAASFLLQQPSSSATKLLYLKPIQTGFPSDSDSRFVFSKLDSLSLRRQIPISISNSVLHSSLPAAKSLGLNVEVSESGMCSLNFRDEKTVTGAPELLCKTLYAWEAAISPHLAAERENATVEDSVVLQMIEKCLKEEMECGVKSEKSDLLCLVETAGGVASPGPSGTLQCDLYRPFRLPGILVGDGRLGGISGTIAAYESLKLRGYDIAAVVFEDHGLVNEVPLTSYLRNKVPVLVLPPVPKDPSDDLIEWFVESDGVFKALKETMVLANLERLERLNGMAKLAGEVFWWPFTQHKLVHQETVTVIDSRCGENFSIYKASDNSSLSQQFDACASWWTQGPDPTFQAELAREMGYTAARFGHVMFPENVYEPALKCAELLLDGVGKGWASRVYFSDNGSTAIEIALKMAFRKFCVDHNFCEATEEEKHIVVKVIALRGSYHGDTLGAMEAQAPSPETGFLQQPWYTGRGLFLDPPTVFLSNGSWNISLPESFSEIAPEYGTFTSRDEIFDKSRDASTLARIYSAYLSKHLQEHSGVRQSAHVGALIIEPVIHGAGGMHMVDPLFQRVLVNECRNRKIPVIFDEVFTGFWRLGVETTTELLGCKPDIACFAKLLTGGMVPLAVTLATDAVFDSFSGDSKLKALLHGHSYSAHAMGCATAAKAIQWFKDPETNHNITSQGKTLRELWDEELVQQISSHSAVQRVVVIGTLFALELKADASNSGYASLYAKSLLIMLREDGIFTRPLGNVIYLMCGPCTSPEICRRLLTKLYKRLGEFNRT

SEQ ID NO: 405 - protein, 812 aa, synthetic construct
  source 1..812: note = Arabidopsis thaliana BioDA DELTAMTP protein Y511F (SEQ ID NO:
MKSTSVSPFHLPLNHPTYLIWSANTSLGKTLVSTGIAASFLLQQPSSSATKLLYLKPIQTGFPSDSDSRFVFSKLDSLSLRRQIPISISNSVLHSSLPAAKSLGLNVEVSESGMCSLNFRDEKTVTGAPELLCKTLYAWEAAISPHLAAERENATVEDSVVLQMIEKCLKEEMECGVKSEKSDLLCLVETAGGVASPGPSGTLQCDLYRPFRLPGILVGDGRLGGISGTIAAYESLKLRGYDIAAVVFEDHGLVNEVPLTSYLRNKVPVLVLPPVPKDPSDDLIEWFVESDGVFKALKETMVLANLERLERLNGMAKLAGEVFWWPFTQHKLVHQETVTVIDSRCGENFSIYKASDNSSLSQQFDACASWWTQGPDPTFQAELAREMGYTAARFGHVMFPENVYEPALKCAELLLDGVGKGWASRVYFSDNGSTAIEIALKMAFRKFCVDHNFCEATEEEKHIVVKVIALRGSYHGDTLGAMEAQAPSPFTGFLQQPWYTGRGLFLDPPTVFLSNGSWNISLPESFSEIAPEYGTFTSRDEIFDKSRDASTLARIYSAYLSKHLQEHSGVRQSAHVGALIIEPVIHGAGGMHMVDPLFQRVLVNECRNRKIPVIFDEVFTGFWRLGVETTTELLGCKPDIACFAKLLTGGMVPLAVTLATDAVFDSFSGDSKLKALLHGHSYSAHAMGCATAAKAIQWFKDPETNHNITSQGKTLRELWDEELVQQISSHSAVQRVVVIGTLFALELKADASNSGYASLYAKSLLIMLREDGIFTRPLGNVIYLMCGPCTSPEICRRLLTKLYKRLGEFNRT

SEQ ID NO: 406 - protein, 812 aa, synthetic construct
  source 1..812: note = Arabidopsis thaliana BioDA DELTAMTP protein Y511M (SEQ ID NO:
MKSTSVSPFHLPLNHPTYLIWSANTSLGKTLVSTGIAASFLLQQPSSSATKLLYLKPIQTGFPSDSDSRFVFSKLDSLSLRRQIPISISNSVLHSSLPAAKSLGLNVEVSESGMCSLNFRDEKTVTGAPELLCKTLYAWEAAISPHLAAERENATVEDSVVLQMIEKCLKEEMECGVKSEKSDLLCLVETAGGVASPGPSGTLQCDLYRPFRLPGILVGDGRLGGISGTIAAYESLKLRGYDIAAVVFEDHGLVNEVPLTSYLRNKVPVLVLPPVPKDPSDDLIEWFVESDGVFKALKETMVLANLERLERLNGMAKLAGEVFWWPFTQHKLVHQETVTVIDSRCGENFSIYKASDNSSLSQQFDACASWWTQGPDPTFQAELAREMGYTAARFGHVMFPENVYEPALKCAELLLDGVGKGWASRVYFSDNGSTAIEIALKMAFRKFCVDHNFCEATEEEKHIVVKVIALRGSYHGDTLGAMEAQAPSPMTGFLQQPWYTGRGLFLDPPTVFLSNGSWNISLPESFSEIAPEYGTFTSRDEIFDKSRDASTLARIYSAYLSKHLQEHSGVRQSAHVGALIIEPVIHGAGGMHMVDPLFQRVLVNECRNRKIPVIFDEVFTGFWRLGVETTTELLGCKPDIACFAKLLTGGMVPLAVTLATDAVFDSFSGDSKLKALLHGHSYSAHAMGCATAAKAIQWFKDPETNHNITSQGKTLRELWDEELVQQISSHSAVQRVVVIGTLFALELKADASNSGYASLYAKSLLIMLREDGIFTRPLGNVIYLMCGPCTSPEICRRLLTKLYKRLGEFNRT

SEQ ID NO: 407 - protein, 812 aa, synthetic construct
  source 1..812: note = Arabidopsis thaliana BioDA DELTAMTP protein Y511P (SEQ ID NO:
MKSTSVSPFHLPLNHPTYLIWSANTSLGKTLVSTGIAASFLLQQPSSSATKLLYLKPIQTGFPSDSDSRFVFSKLDSLSLRRQIPISISNSVLHSSLPAAKSLGLNVEVSESGMCSLNFRDEKTVTGAPELLCKTLYAWEAAISPHLAAERENATVEDSVVLQMIEKCLKEEMECGVKSEKSDLLCLVETAGGVASPGPSGTLQCDLYRPFRLPGILVGDGRLGGISGTIAAYESLKLRGYDIAAVVFEDHGLVNEVPLTSYLRNKVPVLVLPPVPKDPSDDLIEWFVESDGVFKALKETMVLANLERLERLNGMAKLAGEVFWWPFTQHKLVHQETVTVIDSRCGENFSIYKASDNSSLSQQFDACASWWTQGPDPTFQAELAREMGYTAARFGHVMFPENVYEPALKCAELLLDGVGKGWASRVYFSDNGSTAIEIALKMAFRKFCVDHNFCEATEEEKHIVVKVIALRGSYHGDTLGAMEAQAPSPPTGFLQQPWYTGRGLFLDPPTVFLSNGSWNISLPESFSEIAPEYGTFTSRDEIFDKSRDASTLARIYSAYLSKHLQEHSGVRQSAHVGALIIEPVIHGAGGMHMVDPLFQRVLVNECRNRKIPVIFDEVFTGFWRLGVETTTELLGCKPDIACFAKLLTGGMVPLAVTLATDAVFDSFSGDSKLKALLHGHSYSAHAMGCATAAKAIQWFKDPETNHNITSQGKTLRELWDEELVQQISSHSAVQRVVVIGTLFALELKADASNSGYASLYAKSLLIMLREDGIFTRPLGNVIYLMCGPCTSPEICRRLLTKLYKRLGEFNRT

SEQ ID NO: 408 - protein, 812 aa, synthetic construct
  source 1..812: note = Arabidopsis thaliana BioDA DELTAMTP protein Y511R (SEQ ID NO:
MKSTSVSPFHLPLNHPTYLIWSANTSLGKTLVSTGIAASFLLQQPSSSATKLLYLKPIQTGFPSDSDSRFVFSKLDSLSLRRQIPISISNSVLHSSLPAAKSLGLNVEVSESGMCSLNFRDEKTVTGAPELLCKTLYAWEAAISPHLAAERENATVEDSVVLQMIEKCLKEEMECGVKSEKSDLLCLVETAGGVASPGPSGTLQCDLYRPFRLPGILVGDGRLGGISGTIAAYESLKLRGYDIAAVVFEDHGLVNEVPLTSYLRNKVPVLVLPPVPKDPSDDLIEWFVESDGVFKALKETMVLANLERLERLNGMAKLAGEVFWWPFTQHKLVHQETVTVIDSRCGENFSIYKASDNSSLSQQFDACASWWTQGPDPTFQAELAREMGYTAARFGHVMFPENVYEPALKCAELLLDGVGKGWASRVYFSDNGSTAIEIALKMAFRKFCVDHNFCEATEEEKHIVVKVIALRGSYHGDTLGAMEAQAPSPRTGFLQQPWYTGRGLFLDPPTVFLSNGSWNISLPESFSEIAPEYGTFTSRDEIFDKSRDASTLARIYSAYLSKHLQEHSGVRQSAHVGALIIEPVIHGAGGMHMVDPLFQRVLVNECRNRKIPVIFDEVFTGFWRLGVETTTELLGCKPDIACFAKLLTGGMVPLAVTLATDAVFDSFSGDSKLKALLHGHSYSAHAMGCATAAKAIQWFKDPETNHNITSQGKTLRELWDEELVQQISSHSAVQRVVVIGTLFALELKADASNSGYASLYAKSLLIMLREDGIFTRPLGNVIYLMCGPCTSPEICRRLLTKLYKRLGEFNRT

SEQ ID NO: 409 - protein, 812 aa, synthetic construct
  source 1..812: note = Arabidopsis thaliana BioDA DELTAMTP protein Y511V (SEQ ID NO:
MKSTSVSPFHLPLNHPTYLIWSANTSLGKTLVSTGIAASFLLQQPSSSATKLLYLKPIQTGFPSDSDSRFVFSKLDSLSLRRQIPISISNSVLHSSLPAAKSLGLNVEVSESGMCSLNFRDEKTVTGAPELLCKTLYAWEAAISPHLAAERENATVEDSVVLQMIEKCLKEEMECGVKSEKSDLLCLVETAGGVASPGPSGTLQCDLYRPFRLPGILVGDGRLGGISGTIAAYESLKLRGYDIAAVVFEDHGLVNEVPLTSYLRNKVPVLVLPPVPKDPSDDLIEWFVESDGVFKALKETMVLANLERLERLNGMAKLAGEVFWWPFTQHKLVHQETVTVIDSRCGENFSIYKASDNSSLSQQFDACASWWTQGPDPTFQAELAREMGYTAARFGHVMFPENVYEPALKCAELLLDGVGKGWASRVYFSDNGSTAIEIALKMAFRKFCVDHNFCEATEEEKHIVVKVIALRGSYHGDTLGAMEAQAPSPVTGFLQQPWYTGRGLFLDPPTVFLSNGSWNISLPESFSEIAPEYGTFTSRDEIFDKSRDASTLARIYSAYLSKHLQEHSGVRQSAHVGALIIEPVIHGAGGMHMVDPLFQRVLVNECRNRKIPVIFDEVFTGFWRLGVETTTELLGCKPDIACFAKLLTGGMVPLAVTLATDAVFDSFSGDSKLKALLHGHSYSAHAMGCATAAKAIQWFKDPETNHNITSQGKTLRELWDEELVQQISSHSAVQRVVVIGTLFALELKADASNSGYASLYAKSLLIMLREDGIFTRPLGNVIYLMCGPCTSPEICRRLLTKLYKRLGEFNRT

SEQ ID NO: 410 - protein, 812 aa, synthetic construct
  source 1..812: note = Arabidopsis thaliana BioDA DELTAMTP protein Y511W (SEQ ID NO:
MKSTSVSPFHLPLNHPTYLIWSANTSLGKTLVSTGIAASFLLQQPSSSATKLLYLKPIQTGFPSDSDSRFVFSKLDSLSLRRQIPISISNSVLHSSLPAAKSLGLNVEVSESGMCSLNFRDEKTVTGAPELLCKTLYAWEAAISPHLAAERENATVEDSVVLQMIEKCLKEEMECGVKSEKSDLLCLVETAGGVASPGPSGTLQCDLYRPFRLPGILVGDGRLGGISGTIAAYESLKLRGYDIAAVVFEDHGLVNEVPLTSYLRNKVPVLVLPPVPKDPSDDLIEWFVESDGVFKALKETMVLANLERLERLNGMAKLAGEVFWWPFTQHKLVHQETVTVIDSRCGENFSIYKASDNSSLSQQFDACASWWTQGPDPTFQAELAREMGYTAARFGHVMFPENVYEPALKCAELLLDGVGKGWASRVYFSDNGSTAIEIALKMAFRKFCVDHNFCEATEEEKHIVVKVIALRGSYHGDTLGAMEAQAPSPWTGFLQQPWYTGRGLFLDPPTVFLSNGSWNISLPESFSEIAPEYGTFTSRDEIFDKSRDASTLARIYSAYLSKHLQEHSGVRQSAHVGALIIEPVIHGAGGMHMVDPLFQRVLVNECRNRKIPVIFDEVFTGFWRLGVETTTELLGCKPDIACFAKLLTGGMVPLAVTLATDAVFDSFSGDSKLKALLHGHSYSAHAMGCATAAKAIQWFKDPETNHNITSQGKTLRELWDEELVQQISSHSAVQRVVVIGTLFALELKADASNSGYASLYAKSLLIMLREDGIFTRPLGNVIYLMCGPCTSPEICRRLLTKLYKRLGEFNRT

SEQ ID NO: 411 - protein, 812 aa, synthetic construct
  source 1..812: note = Arabidopsis thaliana BioDA DELTAMTP protein A389F (SEQ ID NO:
MKSTSVSPFHLPLNHPTYLIWSANTSLGKTLVSTGIAASFLLQQPSSSATKLLYLKPIQTGFPSDSDSRFVFSKLDSLSLRRQIPISISNSVLHSSLPAAKSLGLNVEVSESGMCSLNFRDEKTVTGAPELLCKTLYAWEAAISPHLAAERENATVEDSVVLQMIEKCLKEEMECGVKSEKSDLLCLVETAGGVASPGPSGTLQCDLYRPFRLPGILVGDGRLGGISGTIAAYESLKLRGYDIAAVVFEDHGLVNEVPLTSYLRNKVPVLVLPPVPKDPSDDLIEWFVESDGVFKALKETMVLANLERLERLNGMAKLAGEVFWWPFTQHKLVHQETVTVIDSRCGENFSIYKASDNSSLSQQFDACFSWWTQGPDPTFQAELAREMGYTAARFGHVMFPENVYEPALKCAELLLDGVGKGWASRVYFSDNGSTAIEIALKMAFRKFCVDHNFCEATEEEKHIVVKVIALRGSYHGDTLGAMEAQAPSPYTGFLQQPWYTGRGLFLDPPTVFLSNGSWNISLPESFSEIAPEYGTFTSRDEIFDKSRDASTLARIYSAYLSKHLQEHSGVRQSAHVGALIIEPVIHGAGGMHMVDPLFQRVLVNECRNRKIPVIFDEVFTGFWRLGVETTTELLGCKPDIACFAKLLTGGMVPLAVTLATDAVFDSFSGDSKLKALLHGHSYSAHAMGCATAAKAIQWFKDPETNHNITSQGKTLRELWDEELVQQISSHSAVQRVVVIGTLFALELKADASNSGYASLYAKSLLIMLREDGIFTRPLGNVIYLMCGPCTSPEICRRLLTKLYKRLGEFNRT

SEQ ID NO: 412 - protein, 812 aa, synthetic construct
  source 1..812: note = Arabidopsis thaliana BioDA DELTAMTP protein A609K (SEQ ID NO:
MKSTSVSPFHLPLNHPTYLIWSANTSLGKTLVSTGIAASFLLQQPSSSATKLLYLKPIQTGFPSDSDSRFVFSKLDSLSLRRQIPISISNSVLHSSLPAAKSLGLNVEVSESGMCSLNFRDEKTVTGAPELLCKTLYAWEAAISPHLAAERENATVEDSVVLQMIEKCLKEEMECGVKSEKSDLLCLVETAGGVASPGPSGTLQCDLYRPFRLPGILVGDGRLGGISGTIAAYESLKLRGYDIAAVVFEDHGLVNEVPLTSYLRNKVPVLVLPPVPKDPSDDLIEWFVESDGVFKALKETMVLANLERLERLNGMAKLAGEVFWWPFTQHKLVHQETVTVIDSRCGENFSIYKASDNSSLSQQFDACASWWTQGPDPTFQAELAREMGYTAARFGHVMFPENVYEPALKCAELLLDGVGKGWASRVYFSDNGSTAIEIALKMAFRKFCVDHNFCEATEEEKHIVVKVIALRGSYHGDTLGAMEAQAPSPYTGFLQQPWYTGRGLFLDPPTVFLSNGSWNISLPESFSEIAPEYGTFTSRDEIFDKSRDASTLARIYSAYLSKHLQEHSGVRQSAHVGALIIEPVIHGKGGMHMVDPLFQRVLVNECRNRKIPVIFDEVFTGFWRLGVETTTELLGCKPDIACFAKLLTGGMVPLAVTLATDAVFDSFSGDSKLKALLHGHSYSAHAMGCATAAKAIQWFKDPETNHNITSQGKTLRELWDEELVQQISSHSAVQRVVVIGTLFALELKADASNSGYASLYAKSLLIMLREDGIFTRPLGNVIYLMCGPCTSPEICRRLLTKLYKRLGEFNRT

SEQ ID NO: 413 - protein, 812 aa, synthetic construct
  source 1..812: note = Arabidopsis thaliana BioDA DELTAMTP protein A609R (SEQ ID NO:
MKSTSVSPFHLPLNHPTYLIWSANTSLGKTLVSTGIAASFLLQQPSSSATKLLYLKPIQTGFPSDSDSRFVFSKLDSLSLRRQIPISISNSVLHSSLPAAKSLGLNVEVSESGMCSLNFRDEKTVTGAPELLCKTLYAWEAAISPHLAAERENATVEDSVVLQMIEKCLKEEMECGVKSEKSDLLCLVETAGGVASPGPSGTLQCDLYRPFRLPGILVGDGRLGGISGTIAAYESLKLRGYDIAAVVFEDHGLVNEVPLTSYLRNKVPVLVLPPVPKDPSDDLIEWFVESDGVFKALKETMVLANLERLERLNGMAKLAGEVFWWPFTQHKLVHQETVTVIDSRCGENFSIYKASDNSSLSQQFDACASWWTQGPDPTFQAELAREMGYTAARFGHVMFPENVYEPALKCAELLLDGVGKGWASRVYFSDNGSTAIEIALKMAFRKFCVDHNFCEATEEEKHIVVKVIALRGSYHGDTLGAMEAQAPSPYTGFLQQPWYTGRGLFLDPPTVFLSNGSWNISLPESFSEIAPEYGTFTSRDEIFDKSRDASTLARIYSAYLSKHLQEHSGVRQSAHVGALIIEPVIHGRGGMHMVDPLFQRVLVNECRNRKIPVIFDEVFTGFWRLGVETTTELLGCKPDIACFAKLLTGGMVPLAVTLATDAVFDSFSGDSKLKALLHGHSYSAHAMGCATAAKAIQWFKDPETNHNITSQGKTLRELWDEELVQQISSHSAVQRVVVIGTLFALELKADASNSGYASLYAKSLLIMLREDGIFTRPLGNVIYLMCGPCTSPEICRRLLTKLYKRLGEFNRT

SEQ ID NO: 414 - protein, 812 aa, synthetic construct
  source 1..812: note = Arabidopsis thaliana BioDA DELTAMTP protein A609Y (SEQ ID NO:
MKSTSVSPFHLPLNHPTYLIWSANTSLGKTLVSTGIAASFLLQQPSSSATKLLYLKPIQTGFPSDSDSRFVFSKLDSLSLRRQIPISISNSVLHSSLPAAKSLGLNVEVSESGMCSLNFRDEKTVTGAPELLCKTLYAWEAAISPHLAAERENATVEDSVVLQMIEKCLKEEMECGVKSEKSDLLCLVETAGGVASPGPSGTLQCDLYRPFRLPGILVGDGRLGGISGTIAAYESLKLRGYDIAAVVFEDHGLVNEVPLTSYLRNKVPVLVLPPVPKDPSDDLIEWFVESDGVFKALKETMVLANLERLERLNGMAKLAGEVFWWPFTQHKLVHQETVTVIDSRCGENFSIYKASDNSSLSQQFDACASWWTQGPDPTFQAELAREMGYTAARFGHVMFPENVYEPALKCAELLLDGVGKGWASRVYFSDNGSTAIEIALKMAFRKFCVDHNFCEATEEEKHIVVKVIALRGSYHGDTLGAMEAQAPSPYTGFLQQPWYTGRGLFLDPPTVFLSNGSWNISLPESFSEIAPEYGTFTSRDEIFDKSRDASTLARIYSAYLSKHLQEHSGVRQSAHVGALIIEPVIHGYGGMHMVDPLFQRVLVNECRNRKIPVIFDEVFTGFWRLGVETTTELLGCKPDIACFAKLLTGGMVPLAVTLATDAVFDSFSGDSKLKALLHGHSYSAHAMGCATAAKAIQWFKDPETNHNITSQGKTLRELWDEELVQQISSHSAVQRVVVIGTLFALELKADASNSGYASLYAKSLLIMLREDGIFTRPLGNVIYLMCGPCTSPEICRRLLTKLYKRLGEFNRT

SEQ ID NO: 415 - protein, 812 aa, synthetic construct
  source 1..812: note = Arabidopsis thaliana BioDA DELTAMTP protein C388M (SEQ ID NO:
MKSTSVSPFHLPLNHPTYLIWSANTSLGKTLVSTGIAASFLLQQPSSSATKLLYLKPIQTGFPSDSDSRFVFSKLDSLSLRRQIPISISNSVLHSSLPAAKSLGLNVEVSESGMCSLNFRDEKTVTGAPELLCKTLYAWEAAISPHLAAERENATVEDSVVLQMIEKCLKEEMECGVKSEKSDLLCLVETAGGVASPGPSGTLQCDLYRPFRLPGILVGDGRLGGISGTIAAYESLKLRGYDIAAVVFEDHGLVNEVPLTSYLRNKVPVLVLPPVPKDPSDDLIEWFVESDGVFKALKETMVLANLERLERLNGMAKLAGEVFWWPFTQHKLVHQETVTVIDSRCGENFSIYKASDNSSLSQQFDAMASWWTQGPDPTFQAELAREMGYTAARFGHVMFPENVYEPALKCAELLLDGVGKGWASRVYFSDNGSTAIEIALKMAFRKFCVDHNFCEATEEEKHIVVKVIALRGSYHGDTLGAMEAQAPSPYTGFLQQPWYTGRGLFLDPPTVFLSNGSWNISLPESFSEIAPEYGTFTSRDEIFDKSRDASTLARIYSAYLSKHLQEHSGVRQSAHVGALIIEPVIHGAGGMHMVDPLFQRVLVNECRNRKIPVIFDEVFTGFWRLGVETTTELLGCKPDIACFAKLLTGGMVPLAVTLATDAVFDSFSGDSKLKALLHGHSYSAHAMGCATAAKAIQWFKDPETNHNITSQGKTLRELWDEELVQQISSHSAVQRVVVIGTLFALELKADASNSGYASLYAKSLLIMLREDGIFTRPLGNVIYLMCGPCTSPEICRRLLTKLYKRLGEFNRT

SEQ ID NO: 416 - protein, 812 aa, synthetic construct
  source 1..812: note = Arabidopsis thaliana BioDA DELTAMTP protein F348A (SEQ ID NO:
MKSTSVSPFHLPLNHPTYLIWSANTSLGKTLVSTGIAASFLLQQPSSSATKLLYLKPIQTGFPSDSDSRFVFSKLDSLSLRRQIPISISNSVLHSSLPAAKSLGLNVEVSESGMCSLNFRDEKTVTGAPELLCKTLYAWEAAISPHLAAERENATVEDSVVLQMIEKCLKEEMECGVKSEKSDLLCLVETAGGVASPGPSGTLQCDLYRPFRLPGILVGDGRLGGISGTIAAYESLKLRGYDIAAVVFEDHGLVNEVPLTSYLRNKVPVLVLPPVPKDPSDDLIEWFVESDGVFKALKETMVLANLERLERLNGMAKLAGEVFWWPATQHKLVHQETVTVIDSRCGENFSIYKASDNSSLSQQFDACASWWTQGPDPTFQAELAREMGYTAARFGHVMFPENVYEPALKCAELLLDGVGKGWASRVYFSDNGSTAIEIALKMAFRKFCVDHNFCEATEEEKHIVVKVIALRGSYHGDTLGAMEAQAPSPYTGFLQQPWYTGRGLFLDPPTVFLSNGSWNISLPESFSEIAPEYGTFTSRDEIFDKSRDASTLARIYSAYLSKHLQEHSGVRQSAHVGALIIEPVIHGAGGMHMVDPLFQRVLVNECRNRKIPVIFDEVFTGFWRLGVETTTELLGCKPDIACFAKLLTGGMVPLAVTLATDAVFDSFSGDSKLKALLHGHSYSAHAMGCATAAKAIQWFKDPETNHNITSQGKTLRELWDEELVQQISSHSAVQRVVVIGTLFALELKADASNSGYASLYAKSLLIMLREDGIFTRPLGNVIYLMCGPCTSPEICRRLLTKLYKRLGEFNRT

SEQ ID NO: 417 - protein, 812 aa, synthetic construct
  source 1..812: note = Arabidopsis thaliana BioDA DELTAMTP protein F348E (SEQ ID NO:
MKSTSVSPFHLPLNHPTYLIWSANTSLGKTLVSTGIAASFLLQQPSSSATKLLYLKPIQTGFPSDSDSRFVFSKLDSLSLRRQIPISISNSVLHSSLPAAKSLGLNVEVSESGMCSLNFRDEKTVTGAPELLCKTLYAWEAAISPHLAAERENATVEDSVVLQMIEKCLKEEMECGVKSEKSDLLCLVETAGGVASPGPSGTLQCDLYRPFRLPGILVGDGRLGGISGTIAAYESLKLRGYDIAAVVFEDHGLVNEVPLTSYLRNKVPVLVLPPVPKDPSDDLIEWFVESDGVFKALKETMVLANLERLERLNGMAKLAGEVFWWPETQHKLVHQETVTVIDSRCGENFSIYKASDNSSLSQQFDACASWWTQGPDPTFQAELAREMGYTAARFGHVMFPENVYEPALKCAELLLDGVGKGWASRVYFSDNGSTAIEIALKMAFRKFCVDHNFCEATEEEKHIVVKVIALRGSYHGDTLGAMEAQAPSPYTGFLQQPWYTGRGLFLDPPTVFLSNGSWNISLPESFSEIAPEYGTFTSRDEIFDKSRDASTLARIYSAYLSKHLQEHSGVRQSAHVGALIIEPVIHGAGGMHMVDPLFQRVLVNECRNRKIPVIFDEVFTGFWRLGVETTTELLGCKPDIACFAKLLTGGMVPLAVTLATDAVFDSFSGDSKLKALLHGHSYSAHAMGCATAAKAIQWFKDPETNHNITSQGKTLRELWDEELVQQISSHSAVQRVVVIGTLFALELKADASNSGYASLYAKSLLIMLREDGIFTRPLGNVIYLMCGPCTSPEICRRLLTKLYKRLGEFNRT

SEQ ID NO: 418 - protein, 812 aa, synthetic construct
  source 1..812: note = Arabidopsis thaliana BioDA DELTAMTP protein F348I (SEQ ID NO:
MKSTSVSPFHLPLNHPTYLIWSANTSLGKTLVSTGIAASFLLQQPSSSATKLLYLKPIQTGFPSDSDSRFVFSKLDSLSLRRQIPISISNSVLHSSLPAAKSLGLNVEVSESGMCSLNFRDEKTVTGAPELLCKTLYAWEAAISPHLAAERENATVEDSVVLQMIEKCLKEEMECGVKSEKSDLLCLVETAGGVASPGPSGTLQCDLYRPFRLPGILVGDGRLGGISGTIAAYESLKLRGYDIAAVVFEDHGLVNEVPLTSYLRNKVPVLVLPPVPKDPSDDLIEWFVESDGVFKALKETMVLANLERLERLNGMAKLAGEVFWWPITQHKLVHQETVTVIDSRCGENFSIYKASDNSSLSQQFDACASWWTQGPDPTFQAELAREMGYTAARFGHVMFPENVYEPALKCAELLLDGVGKGWASRVYFSDNGSTAIEIALKMAFRKFCVDHNFCEATEEEKHIVVKVIALRGSYHGDTLGAMEAQAPSPYTGFLQQPWYTGRGLFLDPPTVFLSNGSWNISLPESFSEIAPEYGTFTSRDEIFDKSRDASTLARIYSAYLSKHLQEHSGVRQSAHVGALIIEPVIHGAGGMHMVDPLFQRVLVNECRNRKIPVIFDEVFTGFWRLGVETTTELLGCKPDIACFAKLLTGGMVPLAVTLATDAVFDSFSGDSKLKALLHGHSYSAHAMGCATAAKAIQWFKDPETNHNITSQGKTLRELWDEELVQQISSHSAVQRVVVIGTLFALELKADASNSGYASLYAKSLLIMLREDGIFTRPLGNVIYLMCGPCTSPEICRRLLTKLYKRLGEFNRT

SEQ ID NO: 419 - protein, 812 aa, synthetic construct
  source 1..812: note = Arabidopsis thaliana BioDA DELTAMTP protein F348K (SEQ ID NO:
MKSTSVSPFHLPLNHPTYLIWSANTSLGKTLVSTGIAASFLLQQPSSSATKLLYLKPIQTGFPSDSDSRFVFSKLDSLSLRRQIPISISNSVLHSSLPAAKSLGLNVEVSESGMCSLNFRDEKTVTGAPELLCKTLYAWEAAISPHLAAERENATVEDSVVLQMIEKCLKEEMECGVKSEKSDLLCLVETAGGVASPGPSGTLQCDLYRPFRLPGILVGDGRLGGISGTIAAYESLKLRGYDIAAVVFEDHGLVNEVPLTSYLRNKVPVLVLPPVPKDPSDDLIEWFVESDGVFKALKETMVLANLERLERLNGMAKLAGEVFWWPKTQHKLVHQETVTVIDSRCGENFSIYKASDNSSLSQQFDACASWWTQGPDPTFQAELAREMGYTAARFGHVMFPENVYEPALKCAELLLDGVGKGWASRVYFSDNGSTAIEIALKMAFRKFCVDHNFCEATEEEKHIVVKVIALRGSYHGDTLGAMEAQAPSPYTGFLQQPWYTGRGLFLDPPTVFLSNGSWNISLPESFSEIAPEYGTFTSRDEIFDKSRDASTLARIYSAYLSKHLQEHSGVRQSAHVGALIIEPVIHGAGGMHMVDPLFQRVLVNECRNRKIPVIFDEVFTGFWRLGVETTTELLGCKPDIACFAKLLTGGMVPLAVTLATDAVFDSFSGDSKLKALLHGHSYSAHAMGCATAAKAIQWFKDPETNHNITSQGKTLRELWDEELVQQISSHSAVQRVVVIGTLFALELKADASNSGYASLYAKSLLIMLREDGIFTRPLGNVIYLMCGPCTSPEICRRLLTKLYKRLGEFNRT

SEQ ID NO: 420 - protein, 812 aa, synthetic construct
  source 1..812: note = Arabidopsis thaliana BioDA DELTAMTP protein F348M (SEQ ID NO:
MKSTSVSPFHLPLNHPTYLIWSANTSLGKTLVSTGIAASFLLQQPSSSATKLLYLKPIQTGFPSDSDSRFVFSKLDSLSLRRQIPISISNSVLHSSLPAAKSLGLNVEVSESGMCSLNFRDEKTVTGAPELLCKTLYAWEAAISPHLAAERENATVEDSVVLQMIEKCLKEEMECGVKSEKSDLLCLVETAGGVASPGPSGTLQCDLYRPFRLPGILVGDGRLGGISGTIAAYESLKLRGYDIAAVVFEDHGLVNEVPLTSYLRNKVPVLVLPPVPKDPSDDLIEWFVESDGVFKALKETMVLANLERLERLNGMAKLAGEVFWWPMTQHKLVHQETVTVIDSRCGENFSIYKASDNSSLSQQFDACASWWTQGPDPTFQAELAREMGYTAARFGHVMFPENVYEPALKCAELLLDGVGKGWASRVYFSDNGSTAIEIALKMAFRKFCVDHNFCEATEEEKHIVVKVIALRGSYHGDTLGAMEAQAPSPYTGFLQQPWYTGRGLFLDPPTVFLSNGSWNISLPESFSEIAPEYGTFTSRDEIFDKSRDASTLARIYSAYLSKHLQEHSGVRQSAHVGALIIEPVIHGAGGMHMVDPLFQRVLVNECRNRKIPVIFDEVFTGFWRLGVETTTELLGCKPDIACFAKLLTGGMVPLAVTLATDAVFDSFSGDSKLKALLHGHSYSAHAMGCATAAKAIQWFKDPETNHNITSQGKTLRELWDEELVQQISSHSAVQRVVVIGTLFALELKADASNSGYASLYAKSLLIMLREDGIFTRPLGNVIYLMCGPCTSPEICRRLLTKLYKRLGEFNRT

SEQ ID NO: 421 - protein, 812 aa, synthetic construct
  source 1..812: note = Arabidopsis thaliana BioDA DELTAMTP protein F348Q (SEQ ID NO:
MKSTSVSPFHLPLNHPTYLIWSANTSLGKTLVSTGIAASFLLQQPSSSATKLLYLKPIQTGFPSDSDSRFVFSKLDSLSLRRQIPISISNSVLHSSLPAAKSLGLNVEVSESGMCSLNFRDEKTVTGAPELLCKTLYAWEAAISPHLAAERENATVEDSVVLQMIEKCLKEEMECGVKSEKSDLLCLVETAGGVASPGPSGTLQCDLYRPFRLPGILVGDGRLGGISGTIAAYESLKLRGYDIAAVVFEDHGLVNEVPLTSYLRNKVPVLVLPPVPKDPSDDLIEWFVESDGVFKALKETMVLANLERLERLNGMAKLAGEVFWWPQTQHKLVHQETVTVIDSRCGENFSIYKASDNSSLSQQFDACASWWTQGPDPTFQAELAREMGYTAARFGHVMFPENVYEPALKCAELLLDGVGKGWASRVYFSDNGSTAIEIALKMAFRKFCVDHNFCEATEEEKHIVVKVIALRGSYHGDTLGAMEAQAPSPYTGFLQQPWYTGRGLFLDPPTVFLSNGSWNISLPESFSEIAPEYGTFTSRDEIFDKSRDASTLARIYSAYLSKHLQEHSGVRQSAHVGALIIEPVIHGAGGMHMVDPLFQRVLVNECRNRKIPVIFDEVFTGFWRLGVETTTELLGCKPDIACFAKLLTGGMVPLAVTLATDAVFDSFSGDSKLKALLHGHSYSAHAMGCATAAKAIQWFKDPETNHNITSQGKTLRELWDEELVQQISSHSAVQRVVVIGTLFALELKADASNSGYASLYAKSLLIMLREDGIFTRPLGNVIYLMCGPCTSPEICRRLLTKLYKRLGEFNRT

SEQ ID NO: 422 - protein, 812 aa, synthetic construct
  source 1..812: note = Arabidopsis thaliana BioDA DELTAMTP protein F370L (SEQ ID NO:
MKSTSVSPFHLPLNHPTYLIWSANTSLGKTLVSTGIAASFLLQQPSSSATKLLYLKPIQTGFPSDSDSRFVFSKLDSLSLRRQIPISISNSVLHSSLPAAKSLGLNVEVSESGMCSLNFRDEKTVTGAPELLCKTLYAWEAAISPHLAAERENATVEDSVVLQMIEKCLKEEMECGVKSEKSDLLCLVETAGGVASPGPSGTLQCDLYRPFRLPGILVGDGRLGGISGTIAAYESLKLRGYDIAAVVFEDHGLVNEVPLTSYLRNKVPVLVLPPVPKDPSDDLIEWFVESDGVFKALKETMVLANLERLERLNGMAKLAGEVFWWPLTQHKLVHQETVTVIDSRCGENFSIYKASDNSSLSQQFDACASWWTQGPDPTFQAELAREMGYTAARFGHVMFPENVYEPALKCAELLLDGVGKGWASRVYFSDNGSTAIEIALKMAFRKFCVDHNFCEATEEEKHIVVKVIALRGSYHGDTLGAMEAQAPSPYTGFLQQPWYTGRGLFLDPPTVFLSNGSWNISLPESFSEIAPEYGTFTSRDEIFDKSRDASTLARIYSAYLSKHLQEHSGVRQSAHVGALIIEPVIHGAGGMHMVDPLFQRVLVNECRNRKIPVIFDEVFTGFWRLGVETTTELLGCKPDIACFAKLLTGGMVPLAVTLATDAVFDSFSGDSKLKALLHGHSYSAHAMGCATAAKAIQWFKDPETNHNITSQGKTLRELWDEELVQQISSHSAVQRVVVIGTLFALELKADASNSGYASLYAKSLLIMLREDGIFTRPLGNVIYLMCGPCTSPEICRRLLTKLYKRLGEFNRT

SEQ ID NO: 423 - protein, 812 aa, synthetic construct; identical to SEQ ID NO: 418
  source 1..812: note = Arabidopsis thaliana BioDA DELTAMTP protein F420I (SEQ ID NO:

SEQ ID NO: 424 - protein, 812 aa, synthetic construct
  source 1..812: note = Arabidopsis thaliana BioDA DELTAMTP protein G513A (SEQ ID NO:
MKSTSVSPFHLPLNHPTYLIWSANTSLGKTLVSTGIAASFLLQQPSSSATKLLYLKPIQTGFPSDSDSRFVFSKLDSLSLRRQIPISISNSVLHSSLPAAKSLGLNVEVSESGMCSLNFRDEKTVTGAPELLCKTLYAWEAAISPHLAAERENATVEDSVVLQMIEKCLKEEMECGVKSEKSDLLCLVETAGGVASPGPSGTLQCDLYRPFRLPGILVGDGRLGGISGTIAAYESLKLRGYDIAAVVFEDHGLVNEVPLTSYLRNKVPVLVLPPVPKDPSDDLIEWFVESDGVFKALKETMVLANLERLERLNGMAKLAGEVFWWPFTQHKLVHQETVTVIDSRCGENFSIYKASDNSSLSQQFDACASWWTQGPDPTFQAELAREMGYTAARFGHVMFPENVYEPALKCAELLLDGVGKGWASRVYFSDNGSTAIEIALKMAFRKFCVDHNFCEATEEEKHIVVKVIALRGSYHGDTLGAMEAQAPSPYTAFLQQPWYTGRGLFLDPPTVFLSNGSWNISLPESFSEIAPEYGTFTSRDEIFDKSRDASTLARIYSAYLSKHLQEHSGVRQSAHVGALIIEPVIHGAGGMHMVDPLFQRVLVNECRNRKIPVIFDEVFTGFWRLGVETTTELLGCKPDIACFAKLLTGGMVPLAVTLATDAVFDSFSGDSKLKALLHGHSYSAHAMGCATAAKAIQWFKDPETNHNITSQGKTLRELWDEELVQQISSHSAVQRVVVIGTLFALELKADASNSGYASLYAKSLLIMLREDGIFTRPLGNVIYLMCGPCTSPEICRRLLTKLYKRLGEFNRT

SEQ ID NO: 425 - protein, 812 aa, synthetic construct
  source 1..812: note = Arabidopsis thaliana BioDA DELTAMTP protein G608A (SEQ ID NO:
MKSTSVSPFHLPLNHPTYLIWSANTSLGKTLVSTGIAASFLLQQPSSSATKLLYLKPIQTGFPSDSDSRFVFSKLDSLSLRRQIPISISNSVLHSSLPAAKSLGLNVEVSESGMCSLNFRDEKTVTGAPELLCKTLYAWEAAISPHLAAERENATVEDSVVLQMIEKCLKEEMECGVKSEKSDLLCLVETAGGVASPGPSGTLQCDLYRPFRLPGILVGDGRLGGISGTIAAYESLKLRGYDIAAVVFEDHGLVNEVPLTSYLRNKVPVLVLPPVPKDPSDDLIEWFVESDGVFKALKETMVLANLERLERLNGMAKLAGEVFWWPFTQHKLVHQETVTVIDSRCGENFSIYKASDNSSLSQQFDACASWWTQGPDPTFQAELAREMGYTAARFGHVMFPENVYEPALKCAELLLDGVGKGWASRVYFSDNGSTAIEIALKMAFRKFCVDHNFCEATEEEKHIVVKVIALRGSYHGDTLGAMEAQAPSPYTGFLQQPWYTGRGLFLDPPTVFLSNGSWNISLPESFSEIAPEYGTFTSRDEIFDKSRDASTLARIYSAYLSKHLQEHSGVRQSAHVGALIIEPVIHAAGGMHMVDPLFQRVLVNECRNRKIPVIFDEVFTGFWRLGVETTTELLGCKPDIACFAKLLTGGMVPLAVTLATDAVFDSFSGDSKLKALLHGHSYSAHAMGCATAAKAIQWFKDPETNHNITSQGKTLRELWDEELVQQISSHSAVQRVVVIGTLFALELKADASNSGYASLYAKSLLIMLREDGIFTRPLGNVIYLMCGPCTSPEICRRLLTKLYKRLGEFNRT

SEQ ID NO: 426 - protein, 812 aa, synthetic construct
  source 1..812: note = Arabidopsis thaliana BioDA DELTAMTP protein G608I (SEQ ID NO:
MKSTSVSPFHLPLNHPTYLIWSANTSLGKTLVSTGIAASFLLQQPSSSATKLLYLKPIQTGFPSDSDSRFVFSKLDSLSLRRQIPISISNSVLHSSLPAAKSLGLNVEVSESGMCSLNFRDEKTVTGAPELLCKTLYAWEAAISPHLAAERENATVEDSVVLQMIEKCLKEEMECGVKSEKSDLLCLVETAGGVASPGPSGTLQCDLYRPFRLPGILVGDGRLGGISGTIAAYESLKLRGYDIAAVVFEDHGLVNEVPLTSYLRNKVPVLVLPPVPKDPSDDLIEWFVESDGVFKALKETMVLANLERLERLNGMAKLAGEVFWWPFTQHKLVHQETVTVIDSRCGENFSIYKASDNSSLSQQFDACASWWTQGPDPTFQAELAREMGYTAARFGHVMFPENVYEPALKCAELLLDGVGKGWASRVYFSDNGSTAIEIALKMAFRKFCVDHNFCEATEEEKHIVVKVIALRGSYHGDTLGAMEAQAPSPYTGFLQQPWYTGRGLFLDPPTVFLSNGSWNISLPESFSEIAPEYGTFTSRDEIFDKSRDASTLARIYSAYLSKHLQEHSGVRQSAHVGALIIEPVIHIAGGMHMVDPLFQRVLVNECRNRKIPVIFDEVFTGFWRLGVETTTELLGCKPDIACFAKLLTGGMVPLAVTLATDAVFDSFSGDSKLKALLHGHSYSAHAMGCATAAKAIQWFKDPETNHNITSQGKTLRELWDEELVQQISSHSAVQRVVVIGTLFALELKADASNSGYASLYAKSLLIMLREDGIFTRPLGNVIYLMCGPCTSPEICRRLLTKLYKRLGEFNRT

SEQ ID NO: 427 - protein, 812 aa, synthetic construct
  source 1..812: note = Arabidopsis thaliana BioDA DELTAMTP protein G610H (SEQ ID NO:
MKSTSVSPFHLPLNHPTYLIWSANTSLGKTLVSTGIAASFLLQQPSSSATKLLYLKPIQTGFPSDSDSRFVFSKLDSLSLRRQIPISISNSVLHSSLPAAKSLGLNVEVSESGMCSLNFRDEKTVTGAPELLCKTLYAWEAAISPHLAAERENATVEDSVVLQMIEKCLKEEMECGVKSEKSDLLCLVETAGGVASPGPSGTLQCDLYRPFRLPGILVGDGRLGGISGTIAAYESLKLRGYDIAAVVFEDHGLVNEVPLTSYLRNKVPVLVLPPVPKDPSDDLIEWFVESDGVFKALKETMVLANLERLERLNGMAKLAGEVFWWPFTQHKLVHQETVTVIDSRCGENFSIYKASDNSSLSQQFDACASWWTQGPDPTFQAELAREMGYTAARFGHVMFPENVYEPALKCAELLLDGVGKGWASRVYFSDNGSTAIEIALKMAFRKFCVDHNFCEATEEEKHIVVKVIALRGSYHGDTLGAMEAQAPSPYTGFLQQPWYTGRGLFLDPPTVFLSNGSWNISLPESFSEIAPEYGTFTSRDEIFDKSRDASTLARIYSAYLSKHLQEHSGVRQSAHVGALIIEPVIHGAHGMHMVDPLFQRVLVNECRNRKIPVIFDEVFTGFWRLGVETTTELLGCKPDIACFAKLLTGGMVPLAVTLATDAVFDSFSGDSKLKALLHGHSYSAHAMGCATAAKAIQWFKDPETNHNITSQGKTLRELWDEELVQQISSHSAVQRVVVIGTLFALELKADASNSGYASLYAKSLLIMLREDGIFTRPLGNVIYLMCGPCTSPEICRRLLTKLYKRLGEFNRT

SEQ ID NO: 428 - protein, 812 aa, synthetic construct
  source 1..812: note = Arabidopsis thaliana BioDA DELTAMTP protein G700C (SEQ ID NO:
MKSTSVSPFHLPLNHPTYLIWSANTSLGKTLVSTGIAASFLLQQPSSSATKLLYLKPIQTGFPSDSDSRFVFSKLDSLSLRRQIPISISNSVLHSSLPAAKSLGLNVEVSESGMCSLNFRDEKTVTGAPELLCKTLYAWEAAISPHLAAERENATVEDSVVLQMIEKCLKEEMECGVKSEKSDLLCLVETAGGVASPGPSGTLQCDLYRPFRLPGILVGDGRLGGISGTIAAYESLKLRGYDIAAVVFEDHGLVNEVPLTSYLRNKVPVLVLPPVPKDPSDDLIEWFVESDGVFKALKETMVLANLERLERLNGMAKLAGEVFWWPFTQHKLVHQETVTVIDSRCGENFSIYKASDNSSLSQQFDACASWWTQGPDPTFQAELAREMGYTAARFGHVMFPENVYEPALKCAELLLDGVGKGWASRVYFSDNGSTAIEIALKMAFRKFCVDHNFCEATEEEKHIVVKVIALRGSYHGDTLGAMEAQAPSPYTGFLQQPWYTGRGLFLDPPTVFLSNGSWNISLPESFSEIAPEYGTFTSRDEIFDKSRDASTLARIYSAYLSKHLQEHSGVRQSAHVGALIIEPVIHGAGGMHMVDPLFQRVLVNECRNRKIPVIFDEVFTGFWRLGVETTTELLGCKPDIACFAKLLTGGMVPLAVTLATDAVFDSFSGDSKLKALLHCHSYSAHAMGCATAAKAIQWFKDPETNHNITSQGKTLRELWDEELVQQISSHSAVQRVVVIGTLFALELKADASNSGYASLYAKSLLIMLREDGIFTRPLGNVIYLMCGPCTSPEICRRLLTKLYKRLGEFNRT

SEQ ID NO: 429 - protein, 812 aa, synthetic construct
  source 1..812: note = Arabidopsis thaliana BioDA DELTAMTP protein H496S (SEQ ID NO:
MKSTSVSPFHLPLNHPTYLIWSANTSLGKTLVSTGIAASFLLQQPSSSATKLLYLKPIQTGFPSDSDSRFVFSKLDSLSLRRQIPISISNSVLHSSLPAAKSLGLNVEVSESGMCSLNFRDEKTVTGAPELLCKTLYAWEAAISPHLAAERENATVEDSVVLQMIEKCLKEEMECGVKSEKSDLLCLVETAGGVASPGPSGTLQCDLYRPFRLPGILVGDGRLGGISGTIAAYESLKLRGYDIAAVVFEDHGLVNEVPLTSYLRNKVPVLVLPPVPKDPSDDLIEWFVESDGVFKALKETMVLANLERLERLNGMAKLAGEVFWWPFTQHKLVHQETVTVIDSRCGENFSIYKASDNSSLSQQFDACASWWTQGPDPTFQAELAREMGYTAARFGHVMFPENVYEPALKCAELLLDGVGKGWASRVYFSDNGSTAIEIALKMAFRKFCVDHNFCEATEEEKHIVVKVIALRGSYSGDTLGAMEAQAPSPYTGFLQQPWYTGRGLFLDPPTVFLSNGSWNISLPESFSEIAPEYGTFTSRDEIFDKSRDASTLARIYSAYLSKHLQEHSGVRQSAHVGALIIEPVIHGAGGMHMVDPLFQRVLVNECRNRKIPVIFDEVFTGFWRLGVETTTELLGCKPDIACFAKLLTGGMVPLAVTLATDAVFDSFSGDSKLKALLHGHSYSAHAMGCATAAKAIQWFKDPETNHNITSQGKTLRELWDEELVQQISSHSAVQRVVVIGTLFALELKADASNSGYASLYAKSLLIMLREDGIFTRPLGNVIYLMCGPCTSPEICRRLLTKLYKRLGEFNRT

SEQ ID NO: 430 - protein, 812 aa, synthetic construct
  source 1..812: note = Arabidopsis thaliana BioDA DELTAMTP protein M419I
MKSTSVSPFHLPLNHPTYLIWSANTSLGKTLVSTGIAASFLLQQPSSSATKLLYLKPIQTGFPSDSDSRFVFSKLDSLSLRRQIPISISNSVLHSSLPAAKSLGLNVEVSESGMCSLNFRDEKTVTGAPELLCKTLYAWEAAISPHLAAERENATVEDSVVLQMIEKCLKEEMECGVKSEKSDLLCLVETAGGVASPGPSGTLQCDLYRPFRLPGILVGDGRLGGISGTIAAYESLKLRGYDIAAVVFEDHGLVNEVPLTSYLRNKVPVLVLPPVPKDPSDDLIEWFVESDGVFKALKETMVLANLERLERLNGMAKLAGEVFWWPFTQHKLVHQETVTVIDSRCGENFSIYKASDNSSLSQQFDACASWWTQGPDPTFQAELAREMGYTAARFGHVIFPENVYEPALKCAELLLDGVGKGWASRVYFSDNGSTAIEIALKMAFRKFCVDHNFCEATEEEKHIVVKVIALRGSYHGDTLGAMEAQAPSPYTGFLQQPWYTGRGLFLDPPTVFLSNGSWNISLPESFSEIAPEYGTFTSRDEIFDKSRDASTLARIYSAYLSKHLQEHSGVRQSAHVGALIIEPVIHGAGGMHMVDPLFQRVLVNECRNRKIPVIFDEVFTGFWRLGVETTTELLGCKPDIACFAKLLTGGMVPLAVTLATDAVFDSFSGDSKLKALLHGHSYSAHAMGCATAAKAIQWFKDPETNHNITSQGKTLRELWDEELVQQISSHSAVQRVVVIGTLFALELKADASNSGYASLYAKSLLIMLREDGIFTRPLGNVIYLMCGPCTSPEICRRLLTKLYKRLGEFNRT

SEQ ID NO: 431 - protein, 812 aa, synthetic construct
  source 1..812: note = Arabidopsis thaliana BioDA DELTAMTP protein M612L
MKSTSVSPFHLPLNHPTYLIWSANTSLGKTLVSTGIAASFLLQQPSSSATKLLYLKPIQTGFPSDSDSRFVFSKLDSLSLRRQIPISISNSVLHSSLPAAKSLGLNVEVSESGMCSLNFRDEKTVTGAPELLCKTLYAWEAAISPHLAAERENATVEDSVVLQMIEKCLKEEMECGVKSEKSDLLCLVETAGGVASPGPSGTLQCDLYRPFRLPGILVGDGRLGGISGTIAAYESLKLRGYDIAAVVFEDHGLVNEVPLTSYLRNKVPVLVLPPVPKDPSDDLIEWFVESDGVFKALKETMVLANLERLERLNGMAKLAGEVFWWPFTQHKLVHQETVTVIDSRCGENFSIYKASDNSSLSQQFDACASWWTQGPDPTFQAELAREMGYTAARFGHVMFPENVYEPALKCAELLLDGVGKGWASRVYFSDNGSTAIEIALKMAFRKFCVDHNFCEATEEEKHIVVKVIALRGSYHGDTLGAMEAQAPSPYTGFLQQPWYTGRGLFLDPPTVFLSNGSWNISLPESFSEIAPEYGTFTSRDEIFDKSRDASTLARIYSAYLSKHLQEHSGVRQSAHVGALIIEPVIHGAGGLHMVDPLFQRVLVNECRNRKIPVIFDEVFTGFWRLGVETTTELLGCKPDIACFAKLLTGGMVPLAVTLATDAVFDSFSGDSKLKALLHGHSYSAHAMGCATAAKAIQWFKDPETNHNITSQGKTLRELWDEELVQQISSHSAVQRVVVIGTLFALELKADASNSGYASLYAKSLLIMLREDGIFTRPLGNVIYLMCGPCTSPEICRRLLTKLYKRLGEFNRT

SEQ ID NO: 432 - protein, 812 aa, synthetic construct
  source 1..812: note = Arabidopsis thaliana BioDA DELTAMTP protein P347A
MKSTSVSPFHLPLNHPTYLIWSANTSLGKTLVSTGIAASFLLQQPSSSATKLLYLKPIQTGFPSDSDSRFVFSKLDSLSLRRQIPISISNSVLHSSLPAAKSLGLNVEVSESGMCSLNFRDEKTVTGAPELLCKTLYAWEAAISPHLAAERENATVEDSVVLQMIEKCLKEEMECGVKSEKSDLLCLVETAGGVASPGPSGTLQCDLYRPFRLPGILVGDGRLGGISGTIAAYESLKLRGYDIAAVVFEDHGLVNEVPLTSYLRNKVPVLVLPPVPKDPSDDLIEWFVESDGVFKALKETMVLANLERLERLNGMAKLAGEVFWWAFTQHKLVHQETVTVIDSRCGENFSIYKASDNSSLSQQFDACASWWTQGPDPTFQAELAREMGYTAARFGHVMFPENVYEPALKCAELLLDGVGKGWASRVYFSDNGSTAIEIALKMAFRKFCVDHNFCEATEEEKHIVVKVIALRGSYHGDTLGAMEAQAPSPYTGFLQQPWYTGRGLFLDPPTVFLSNGSWNISLPESFSEIAPEYGTFTSRDEIFDKSRDASTLARIYSAYLSKHLQEHSGVRQSAHVGALIIEPVIHGAGGMHMVDPLFQRVLVNECRNRKIPVIFDEVFTGFWRLGVETTTELLGCKPDIACFAKLLTGGMVPLAVTLATDAVFDSFSGDSKLKALLHGHSYSAHAMGCATAAKAIQWFKDPETNHNITSQGKTLRELWDEELVQQISSHSAVQRVVVIGTLFALELKADASNSGYASLYAKSLLIMLREDGIFTRPLGNVIYLMCGPCTSPEICRRLLTKLYKRLGEFNRT

SEQ ID NO: 433 - protein, 812 aa, synthetic construct
  source 1..812: note = Arabidopsis thaliana BioDA DELTAMTP protein P347E
MKSTSVSPFHLPLNHPTYLIWSANTSLGKTLVSTGIAASFLLQQPSSSATKLLYLKPIQTGFPSDSDSRFVFSKLDSLSLRRQIPISISNSVLHSSLPAAKSLGLNVEVSESGMCSLNFRDEKTVTGAPELLCKTLYAWEAAISPHLAAERENATVEDSVVLQMIEKCLKEEMECGVKSEKSDLLCLVETAGGVASPGPSGTLQCDLYRPFRLPGILVGDGRLGGISGTIAAYESLKLRGYDIAAVVFEDHGLVNEVPLTSYLRNKVPVLVLPPVPKDPSDDLIEWFVESDGVFKALKETMVLANLERLERLNGMAKLAGEVFWWEFTQHKLVHQETVTVIDSRCGENFSIYKASDNSSLSQQFDACASWWTQGPDPTFQAELAREMGYTAARFGHVMFPENVYEPALKCAELLLDGVGKGWASRVYFSDNGSTAIEIALKMAFRKFCVDHNFCEATEEEKHIVVKVIALRGSYHGDTLGAMEAQAPSPYTGFLQQPWYTGRGLFLDPPTVFLSNGSWNISLPESFSEIAPEYGTFTSRDEIFDKSRDASTLARIYSAYLSKHLQEHSGVRQSAHVGALIIEPVIHGAGGMHMVDPLFQRVLVNECRNRKIPVIFDEVFTGFWRLGVETTTELLGCKPDIACFAKLLTGGMVPLAVTLATDAVFDSFSGDSKLKALLHGHSYSAHAMGCATAAKAIQWFKDPETNHNITSQGKTLRELWDEELVQQISSHSAVQRVVVIGTLFALELKADASNSGYASLYAKSLLIMLREDGIFTRPLGNVIYLMCGPCTSPEICRRLLTKLYKRLGEFNRT

SEQ ID NO: 434 - protein, 812 aa, synthetic construct
  source 1..812: note = Arabidopsis thaliana BioDA DELTAMTP protein P421A
MKSTSVSPFHLPLNHPTYLIWSANTSLGKTLVSTGIAASFLLQQPSSSATKLLYLKPIQTGFPSDSDSRFVFSKLDSLSLRRQIPISISNSVLHSSLPAAKSLGLNVEVSESGMCSLNFRDEKTVTGAPELLCKTLYAWEAAISPHLAAERENATVEDSVVLQMIEKCLKEEMECGVKSEKSDLLCLVETAGGVASPGPSGTLQCDLYRPFRLPGILVGDGRLGGISGTIAAYESLKLRGYDIAAVVFEDHGLVNEVPLTSYLRNKVPVLVLPPVPKDPSDDLIEWFVESDGVFKALKETMVLANLERLERLNGMAKLAGEVFWWPFTQHKLVHQETVTVIDSRCGENFSIYKASDNSSLSQQFDACASWWTQGPDPTFQAELAREMGYTAARFGHVMFAENVYEPALKCAELLLDGVGKGWASRVYFSDNGSTAIEIALKMAFRKFCVDHNFCEATEEEKHIVVKVIALRGSYHGDTLGAMEAQAPSPYTGFLQQPWYTGRGLFLDPPTVFLSNGSWNISLPESFSEIAPEYGTFTSRDEIFDKSRDASTLARIYSAYLSKHLQEHSGVRQSAHVGALIIEPVIHGAGGMHMVDPLFQRVLVNECRNRKIPVIFDEVFTGFWRLGVETTTELLGCKPDIACFAKLLTGGMVPLAVTLATDAVFDSFSGDSKLKALLHGHSYSAHAMGCATAAKAIQWFKDPETNHNITSQGKTLRELWDEELVQQISSHSAVQRVVVIGTLFALELKADASNSGYASLYAKSLLIMLREDGIFTRPLGNVIYLMCGPCTSPEICRRLLTKLYKRLGEFNRT

SEQ ID NO: 435 - protein, 815 aa, synthetic construct
  source 1..815: note = Arabidopsis thaliana BioDA DELTAMTP protein P421E
MKSTSVSPFHLPLNHPTYLIWSANTSLGKTLVSTGIAASFLLQQPSSSATKLLYLKPIQTGFPSDSDSRFVFSKLDSLSLRRQIPISISNSVLHSSLPAAKSLGLNVEVSESGMCSLNFRDEKTVTGAPELLCKTLYAWEAAISPHLAAERENATVEDSVVLQMIEKCLKEEMECGVKSEKSDLLCLVETAGGVASPGPSGTLQCDLYRPFRLPGILVGDGRLGGISGTIAAYESLKLRGYDIAAVVFEDHGLVNEVPLTSYLRNKVPVLVLPPVPKDPSDDLIEWFVESDGVFKALKETMVLANLERLERLNGMAKLAGEVFWWPFTQHKLVHQETVTVIDSRCGENFSIYKASDNSSLSQQFDACASWWTQGPDPTFQAELAREMGYTAARFGHVMFEENVYEPALKCAELLLDGVGKGWASRVYFSDNGSTAIEIALKMAFRKFCVDHNFCEATEEEKHIVVKVIALRGSYHGDTLGAMEAQAPSPYTGFLQQPWYTGRGLFLDPPTVFLSNGSWNISLPESFSEIAPEYGTFTSRDEIFDKSRDASTLARIYSAYLSKHLQEHSGVRQSAHVGALIIEPVIHGAGGMHMVDPLFQRVLVNECRNRKIPVIFDEVFTGFWRLGVETTTELLGCKPDIACFAKLLTGGMVPLAVTLATDAVFDSFSGDSKLKALLHGHSYSAHAMGCATAAKAIQWFKDPETNHNITSQGKTLRELWDEELVQQISSHSAVQRVVVIGTLFALELKADASNSGYASLYAKSLLIMLREDGIFTRPLGNVIYLMCGPCTSPEICRRLLTKLYKRLGEFNRTNRT

SEQ ID NO: 436 - protein, 812 aa, synthetic construct
  source 1..812: note = Arabidopsis thaliana BioDA DELTAMTP protein P421W
MKSTSVSPFHLPLNHPTYLIWSANTSLGKTLVSTGIAASFLLQQPSSSATKLLYLKPIQTGFPSDSDSRFVFSKLDSLSLRRQIPISISNSVLHSSLPAAKSLGLNVEVSESGMCSLNFRDEKTVTGAPELLCKTLYAWEAAISPHLAAERENATVEDSVVLQMIEKCLKEEMECGVKSEKSDLLCLVETAGGVASPGPSGTLQCDLYRPFRLPGILVGDGRLGGISGTIAAYESLKLRGYDIAAVVFEDHGLVNEVPLTSYLRNKVPVLVLPPVPKDPSDDLIEWFVESDGVFKALKETMVLANLERLERLNGMAKLAGEVFWWPFTQHKLVHQETVTVIDSRCGENFSIYKASDNSSLSQQFDACASWWTQGPDPTFQAELAREMGYTAARFGHVMFWENVYEPALKCAELLLDGVGKGWASRVYFSDNGSTAIEIALKMAFRKFCVDHNFCEATEEEKHIVVKVIALRGSYHGDTLGAMEAQAPSPYTGFLQQPWYTGRGLFLDPPTVFLSNGSWNISLPESFSEIAPEYGTFTSRDEIFDKSRDASTLARIYSAYLSKHLQEHSGVRQSAHVGALIIEPVIHGAGGMHMVDPLFQRVLVNECRNRKIPVIFDEVFTGFWRLGVETTTELLGCKPDIACFAKLLTGGMVPLAVTLATDAVFDSFSGDSKLKALLHGHSYSAHAMGCATAAKAIQWFKDPETNHNITSQGKTLRELWDEELVQQISSHSAVQRVVVIGTLFALELKADASNSGYASLYAKSLLIMLREDGIFTRPLGNVIYLMCGPCTSPEICRRLLTKLYKRLGEFNRT

SEQ ID NO: 437 - protein, 812 aa, synthetic construct
  source 1..812: note = Arabidopsis thaliana BioDA DELTAMTP protein P510A
MKSTSVSPFHLPLNHPTYLIWSANTSLGKTLVSTGIAASFLLQQPSSSATKLLYLKPIQTGFPSDSDSRFVFSKLDSLSLRRQIPISISNSVLHSSLPAAKSLGLNVEVSESGMCSLNFRDEKTVTGAPELLCKTLYAWEAAISPHLAAERENATVEDSVVLQMIEKCLKEEMECGVKSEKSDLLCLVETAGGVASPGPSGTLQCDLYRPFRLPGILVGDGRLGGISGTIAAYESLKLRGYDIAAVVFEDHGLVNEVPLTSYLRNKVPVLVLPPVPKDPSDDLIEWFVESDGVFKALKETMVLANLERLERLNGMAKLAGEVFWWPFTQHKLVHQETVTVIDSRCGENFSIYKASDNSSLSQQFDACASWWTQGPDPTFQAELAREMGYTAARFGHVMFPENVYEPALKCAELLLDGVGKGWASRVYFSDNGSTAIEIALKMAFRKFCVDHNFCEATEEEKHIVVKVIALRGSYHGDTLGAMEAQAPSAYTGFLQQPWYTGRGLFLDPPTVFLSNGSWNISLPESFSEIAPEYGTFTSRDEIFDKSRDASTLARIYSAYLSKHLQEHSGVRQSAHVGALIIEPVIHGAGGMHMVDPLFQRVLVNECRNRKIPVIFDEVFTGFWRLGVETTTELLGCKPDIACFAKLLTGGMVPLAVTLATDAVFDSFSGDSKLKALLHGHSYSAHAMGCATAAKAIQWFKDPETNHNITSQGKTLRELWDEELVQQISSHSAVQRVVVIGTLFALELKADASNSGYASLYAKSLLIMLREDGIFTRPLGNVIYLMCGPCTSPEICRRLLTKLYKRLGEFNRT

SEQ ID NO: 438 - protein, 812 aa, synthetic construct
  source 1..812: note = Arabidopsis thaliana BioDA DELTAMTP protein P510C
MKSTSVSPFHLPLNHPTYLIWSANTSLGKTLVSTGIAASFLLQQPSSSATKLLYLKPIQTGFPSDSDSRFVFSKLDSLSLRRQIPISISNSVLHSSLPAAKSLGLNVEVSESGMCSLNFRDEKTVTGAPELLCKTLYAWEAAISPHLAAERENATVEDSVVLQMIEKCLKEEMECGVKSEKSDLLCLVETAGGVASPGPSGTLQCDLYRPFRLPGILVGDGRLGGISGTIAAYESLKLRGYDIAAVVFEDHGLVNEVPLTSYLRNKVPVLVLPPVPKDPSDDLIEWFVESDGVFKALKETMVLANLERLERLNGMAKLAGEVFWWPFTQHKLVHQETVTVIDSRCGENFSIYKASDNSSLSQQFDACASWWTQGPDPTFQAELAREMGYTAARFGHVMFPENVYEPALKCAELLLDGVGKGWASRVYFSDNGSTAIEIALKMAFRKFCVDHNFCEATEEEKHIVVKVIALRGSYHGDTLGAMEAQAPSCYTGFLQQPWYTGRGLFLDPPTVFLSNGSWNISLPESFSEIAPEYGTFTSRDEIFDKSRDASTLARIYSAYLSKHLQEHSGVRQSAHVGALIIEPVIHGAGGMHMVDPLFQRVLVNECRNRKIPVIFDEVFTGFWRLGVETTTELLGCKPDIACFAKLLTGGMVPLAVTLATDAVFDSFSGDSKLKALLHGHSYSAHAMGCATAAKAIQWFKDPETNHNITSQGKTLRELWDEELVQQISSHSAVQRVVVIGTLFALELKADASNSGYASLYAKSLLIMLREDGIFTRPLGNVIYLMCGPCTSPEICRRLLTKLYKRLGEFNRT

SEQ ID NO: 439 - protein, 812 aa, synthetic construct
  source 1..812: note = Arabidopsis thaliana BioDA DELTAMTP protein P510E
MKSTSVSPFHLPLNHPTYLIWSANTSLGKTLVSTGIAASFLLQQPSSSATKLLYLKPIQTGFPSDSDSRFVFSKLDSLSLRRQIPISISNSVLHSSLPAAKSLGLNVEVSESGMCSLNFRDEKTVTGAPELLCKTLYAWEAAISPHLAAERENATVEDSVVLQMIEKCLKEEMECGVKSEKSDLLCLVETAGGVASPGPSGTLQCDLYRPFRLPGILVGDGRLGGISGTIAAYESLKLRGYDIAAVVFEDHGLVNEVPLTSYLRNKVPVLVLPPVPKDPSDDLIEWFVESDGVFKALKETMVLANLERLERLNGMAKLAGEVFWWPFTQHKLVHQETVTVIDSRCGENFSIYKASDNSSLSQQFDACASWWTQGPDPTFQAELAREMGYTAARFGHVMFPENVYEPALKCAELLLDGVGKGWASRVYFSDNGSTAIEIALKMAFRKFCVDHNFCEATEEEKHIVVKVIALRGSYHGDTLGAMEAQAPSEYTGFLQQPWYTGRGLFLDPPTVFLSNGSWNISLPESFSEIAPEYGTFTSRDEIFDKSRDASTLARIYSAYLSKHLQEHSGVRQSAHVGALIIEPVIHGAGGMHMVDPLFQRVLVNECRNRKIPVIFDEVFTGFWRLGVETTTELLGCKPDIACFAKLLTGGMVPLAVTLATDAVFDSFSGDSKLKALLHGHSYSAHAMGCATAAKAIQWFKDPETNHNITSQGKTLRELWDEELVQQISSHSAVQRVVVIGTLFALELKADASNSGYASLYAKSLLIMLREDGIFTRPLGNVIYLMCGPCTSPEICRRLLTKLYKRLGEFNRT

SEQ ID NO: 440 - protein, 812 aa, synthetic construct
  source 1..812: note = Arabidopsis thaliana BioDA DELTAMTP protein P510Q
MKSTSVSPFHLPLNHPTYLIWSANTSLGKTLVSTGIAASFLLQQPSSSATKLLYLKPIQTGFPSDSDSRFVFSKLDSLSLRRQIPISISNSVLHSSLPAAKSLGLNVEVSESGMCSLNFRDEKTVTGAPELLCKTLYAWEAAISPHLAAERENATVEDSVVLQMIEKCLKEEMECGVKSEKSDLLCLVETAGGVASPGPSGTLQCDLYRPFRLPGILVGDGRLGGISGTIAAYESLKLRGYDIAAVVFEDHGLVNEVPLTSYLRNKVPVLVLPPVPKDPSDDLIEWFVESDGVFKALKETMVLANLERLERLNGMAKLAGEVFWWPFTQHKLVHQETVTVIDSRCGENFSIYKASDNSSLSQQFDACASWWTQGPDPTFQAELAREMGYTAARFGHVMFPENVYEPALKCAELLLDGVGKGWASRVYFSDNGSTAIEIALKMAFRKFCVDHNFCEATEEEKHIVVKVIALRGSYHGDTLGAMEAQAPSQYTGFLQQPWYTGRGLFLDPPTVFLSNGSWNISLPESFSEIAPEYGTFTSRDEIFDKSRDASTLARIYSAYLSKHLQEHSGVRQSAHVGALIIEPVIHGAGGMHMVDPLFQRVLVNECRNRKIPVIFDEVFTGFWRLGVETTTELLGCKPDIACFAKLLTGGMVPLAVTLATDAVFDSFSGDSKLKALLHGHSYSAHAMGCATAAKAIQWFKDPETNHNITSQGKTLRELWDEELVQQISSHSAVQRVVVIGTLFALELKADASNSGYASLYAKSLLIMLREDGIFTRPLGNVIYLMCGPCTSPEICRRLLTKLYKRLGEFNRT

SEQ ID NO: 441 - protein, 812 aa, synthetic construct
  source 1..812: note = Arabidopsis thaliana BioDA DELTAMTP protein P510V
MKSTSVSPFHLPLNHPTYLIWSANTSLGKTLVSTGIAASFLLQQPSSSATKLLYLKPIQTGFPSDSDSRFVFSKLDSLSLRRQIPISISNSVLHSSLPAAKSLGLNVEVSESGMCSLNFRDEKTVTGAPELLCKTLYAWEAAISPHLAAERENATVEDSVVLQMIEKCLKEEMECGVKSEKSDLLCLVETAGGVASPGPSGTLQCDLYRPFRLPGILVGDGRLGGISGTIAAYESLKLRGYDIAAVVFEDHGLVNEVPLTSYLRNKVPVLVLPPVPKDPSDDLIEWFVESDGVFKALKETMVLANLERLERLNGMAKLAGEVFWWPFTQHKLVHQETVTVIDSRCGENFSIYKASDNSSLSQQFDACASWWTQGPDPTFQAELAREMGYTAARFGHVMFPENVYEPALKCAELLLDGVGKGWASRVYFSDNGSTAIEIALKMAFRKFCVDHNFCEATEEEKHIVVKVIALRGSYHGDTLGAMEAQAPSVYTGFLQQPWYTGRGLFLDPPTVFLSNGSWNISLPESFSEIAPEYGTFTSRDEIFDKSRDASTLARIYSAYLSKHLQEHSGVRQSAHVGALIIEPVIHGAGGMHMVDPLFQRVLVNECRNRKIPVIFDEVFTGFWRLGVETTTELLGCKPDIACFAKLLTGGMVPLAVTLATDAVFDSFSGDSKLKALLHGHSYSAHAMGCATAAKAIQWFKDPETNHNITSQGKTLRELWDEELVQQISSHSAVQRVVVIGTLFALELKADASNSGYASLYAKSLLIMLREDGIFTRPLGNVIYLMCGPCTSPEICRRLLTKLYKRLGEFNRT

SEQ ID NO: 442 - protein, 812 aa, synthetic construct
  source 1..812: note = Arabidopsis thaliana BioDA DELTAMTP protein P529A
MKSTSVSPFHLPLNHPTYLIWSANTSLGKTLVSTGIAASFLLQQPSSSATKLLYLKPIQTGFPSDSDSRFVFSKLDSLSLRRQIPISISNSVLHSSLPAAKSLGLNVEVSESGMCSLNFRDEKTVTGAPELLCKTLYAWEAAISPHLAAERENATVEDSVVLQMIEKCLKEEMECGVKSEKSDLLCLVETAGGVASPGPSGTLQCDLYRPFRLPGILVGDGRLGGISGTIAAYESLKLRGYDIAAVVFEDHGLVNEVPLTSYLRNKVPVLVLPPVPKDPSDDLIEWFVESDGVFKALKETMVLANLERLERLNGMAKLAGEVFWWPFTQHKLVHQETVTVIDSRCGENFSIYKASDNSSLSQQFDACASWWTQGPDPTFQAELAREMGYTAARFGHVMFPENVYEPALKCAELLLDGVGKGWASRVYFSDNGSTAIEIALKMAFRKFCVDHNFCEATEEEKHIVVKVIALRGSYHGDTLGAMEAQAPSPYTGFLQQPWYTGRGLFLDAPTVFLSNGSWNISLPESFSEIAPEYGTFTSRDEIFDKSRDASTLARIYSAYLSKHLQEHSGVRQSAHVGALIIEPVIHGAGGMHMVDPLFQRVLVNECRNRKIPVIFDEVFTGFWRLGVETTTELLGCKPDIACFAKLLTGGMVPLAVTLATDAVFDSFSGDSKLKALLHGHSYSAHAMGCATAAKAIQWFKDPETNHNITSQGKTLRELWDEELVQQISSHSAVQRVVVIGTLFALELKADASNSGYASLYAKSLLIMLREDGIFTRPLGNVIYLMCGPCTSPEICRRLLTKLYKRLGEFNRT

SEQ ID NO: 443 - protein, 812 aa, synthetic construct
  source 1..812: note = Arabidopsis thaliana BioDA DELTAMTP protein Q350H
MKSTSVSPFHLPLNHPTYLIWSANTSLGKTLVSTGIAASFLLQQPSSSATKLLYLKPIQTGFPSDSDSRFVFSKLDSLSLRRQIPISISNSVLHSSLPAAKSLGLNVEVSESGMCSLNFRDEKTVTGAPELLCKTLYAWEAAISPHLAAERENATVEDSVVLQMIEKCLKEEMECGVKSEKSDLLCLVETAGGVASPGPSGTLQCDLYRPFRLPGILVGDGRLGGISGTIAAYESLKLRGYDIAAVVFEDHGLVNEVPLTSYLRNKVPVLVLPPVPKDPSDDLIEWFVESDGVFKALKETMVLANLERLERLNGMAKLAGEVFWWPFTHHKLVHQETVTVIDSRCGENFSIYKASDNSSLSQQFDACASWWTQGPDPTFQAELAREMGYTAARFGHVMFPENVYEPALKCAELLLDGVGKGWASRVYFSDNGSTAIEIALKMAFRKFCVDHNFCEATEEEKHIVVKVIALRGSYHGDTLGAMEAQAPSPYTGFLQQPWYTGRGLFLDPPTVFLSNGSWNISLPESFSEIAPEYGTFTSRDEIFDKSRDASTLARIYSAYLSKHLQEHSGVRQSAHVGALIIEPVIHGAGGMHMVDPLFQRVLVNECRNRKIPVIFDEVFTGFWRLGVETTTELLGCKPDIACFAKLLTGGMVPLAVTLATDAVFDSFSGDSKLKALLHGHSYSAHAMGCATAAKAIQWFKDPETNHNITSQGKTLRELWDEELVQQISSHSAVQRVVVIGTLFALELKADASNSGYASLYAKSLLIMLREDGIFTRPLGNVIYLMCGPCTSPEICRRLLTKLYKRLGEFNRT

SEQ ID NO: 444 - protein, 812 aa, synthetic construct
  source 1..812: note = Arabidopsis thaliana BioDA DELTAMTP protein Q350S
MKSTSVSPFHLPLNHPTYLIWSANTSLGKTLVSTGIAASFLLQQPSSSATKLLYLKPIQTGFPSDSDSRFVFSKLDSLSLRRQIPISISNSVLHSSLPAAKSLGLNVEVSESGMCSLNFRDEKTVTGAPELLCKTLYAWEAAISPHLAAERENATVEDSVVLQMIEKCLKEEMECGVKSEKSDLLCLVETAGGVASPGPSGTLQCDLYRPFRLPGILVGDGRLGGISGTIAAYESLKLRGYDIAAVVFEDHGLVNEVPLTSYLRNKVPVLVLPPVPKDPSDDLIEWFVESDGVFKALKETMVLANLERLERLNGMAKLAGEVFWWPFTSHKLVHQETVTVIDSRCGENFSIYKASDNSSLSQQFDACASWWTQGPDPTFQAELAREMGYTAARFGHVMFPENVYEPALKCAELLLDGVGKGWASRVYFSDNGSTAIEIALKMAFRKFCVDHNFCEATEEEKHIVVKVIALRGSYHGDTLGAMEAQAPSPYTGFLQQPWYTGRGLFLDPPTVFLSNGSWNISLPESFSEIAPEYGTFTSRDEIFDKSRDASTLARIYSAYLSKHLQEHSGVRQSAHVGALIIEPVIHGAGGMHMVDPLFQRVLVNECRNRKIPVIFDEVFTGFWRLGVETTTELLGCKPDIACFAKLLTGGMVPLAVTLATDAVFDSFSGDSKLKALLHGHSYSAHAMGCATAAKAIQWFKDPETNHNITSQGKTLRELWDEELVQQISSHSAVQRVVVIGTLFALELKADASNSGYASLYAKSLLIMLREDGIFTRPLGNVIYLMCGPCTSPEICRRLLTKLYKRLGEFNRT

SEQ ID NO: 445 - protein, 812 aa, synthetic construct
  source 1..812: note = Arabidopsis thaliana BioDA DELTAMTP protein Q517H
MKSTSVSPFHLPLNHPTYLIWSANTSLGKTLVSTGIAASFLLQQPSSSATKLLYLKPIQTGFPSDSDSRFVFSKLDSLSLRRQIPISISNSVLHSSLPAAKSLGLNVEVSESGMCSLNFRDEKTVTGAPELLCKTLYAWEAAISPHLAAERENATVEDSVVLQMIEKCLKEEMECGVKSEKSDLLCLVETAGGVASPGPSGTLQCDLYRPFRLPGILVGDGRLGGISGTIAAYESLKLRGYDIAAVVFEDHGLVNEVPLTSYLRNKVPVLVLPPVPKDPSDDLIEWFVESDGVFKALKETMVLANLERLERLNGMAKLAGEVFWWPFTQHKLVHQETVTVIDSRCGENFSIYKASDNSSLSQQFDACASWWTQGPDPTFQAELAREMGYTAARFGHVMFPENVYEPALKCAELLLDGVGKGWASRVYFSDNGSTAIEIALKMAFRKFCVDHNFCEATEEEKHIVVKVIALRGSYHGDTLGAMEAQAPSPYTGFLQHPWYTGRGLFLDPPTVFLSNGSWNISLPESFSEIAPEYGTFTSRDEIFDKSRDASTLARIYSAYLSKHLQEHSGVRQSAHVGALIIEPVIHGAGGMHMVDPLFQRVLVNECRNRKIPVIFDEVFTGFWRLGVETTTELLGCKPDIACFAKLLTGGMVPLAVTLATDAVFDSFSGDSKLKALLHGHSYSAHAMGCATAAKAIQWFKDPETNHNITSQGKTLRELWDEELVQQISSHSAVQRVVVIGTLFALELKADASNSGYASLYAKSLLIMLREDGIFTRPLGNVIYLMCGPCTSPEICRRLLTKLYKRLGEFNRT

SEQ ID NO: 446 - protein, 812 aa, synthetic construct
  source 1..812: note = Arabidopsis thaliana BioDA DELTAMTP protein Q517I
MKSTSVSPFHLPLNHPTYLIWSANTSLGKTLVSTGIAASFLLQQPSSSATKLLYLKPIQTGFPSDSDSRFVFSKLDSLSLRRQIPISISNSVLHSSLPAAKSLGLNVEVSESGMCSLNFRDEKTVTGAPELLCKTLYAWEAAISPHLAAERENATVEDSVVLQMIEKCLKEEMECGVKSEKSDLLCLVETAGGVASPGPSGTLQCDLYRPFRLPGILVGDGRLGGISGTIAAYESLKLRGYDIAAVVFEDHGLVNEVPLTSYLRNKVPVLVLPPVPKDPSDDLIEWFVESDGVFKALKETMVLANLERLERLNGMAKLAGEVFWWPFTQHKLVHQETVTVIDSRCGENFSIYKASDNSSLSQQFDACASWWTQGPDPTFQAELAREMGYTAARFGHVMFPENVYEPALKCAELLLDGVGKGWASRVYFSDNGSTAIEIALKMAFRKFCVDHNFCEATEEEKHIVVKVIALRGSYHGDTLGAMEAQAPSPYTGFLQIPWYTGRGLFLDPPTVFLSNGSWNISLPESFSEIAPEYGTFTSRDEIFDKSRDASTLARIYSAYLSKHLQEHSGVRQSAHVGALIIEPVIHGAGGMHMVDPLFQRVLVNECRNRKIPVIFDEVFTGFWRLGVETTTELLGCKPDIACFAKLLTGGMVPLAVTLATDAVFDSFSGDSKLKALLHGHSYSAHAMGCATAAKAIQWFKDPETNHNITSQGKTLRELWDEELVQQISSHSAVQRVVVIGTLFALELKADASNSGYASLYAKSLLIMLREDGIFTRPLGNVIYLMCGPCTSPEICRRLLTKLYKRLGEFNRT

SEQ ID NO: 447 - protein, 812 aa, synthetic construct
  source 1..812: note = Arabidopsis thaliana BioDA DELTAMTP protein Q517W
MKSTSVSPFHLPLNHPTYLIWSANTSLGKTLVSTGIAASFLLQQPSSSATKLLYLKPIQTGFPSDSDSRFVFSKLDSLSLRRQIPISISNSVLHSSLPAAKSLGLNVEVSESGMCSLNFRDEKTVTGAPELLCKTLYAWEAAISPHLAAERENATVEDSVVLQMIEKCLKEEMECGVKSEKSDLLCLVETAGGVASPGPSGTLQCDLYRPFRLPGILVGDGRLGGISGTIAAYESLKLRGYDIAAVVFEDHGLVNEVPLTSYLRNKVPVLVLPPVPKDPSDDLIEWFVESDGVFKALKETMVLANLERLERLNGMAKLAGEVFWWPFTQHKLVHQETVTVIDSRCGENFSIYKASDNSSLSQQFDACASWWTQGPDPTFQAELAREMGYTAARFGHVMFPENVYEPALKCAELLLDGVGKGWASRVYFSDNGSTAIEIALKMAFRKFCVDHNFCEATEEEKHIVVKVIALRGSYHGDTLGAMEAQAPSPYTGFLQWPWYTGRGLFLDPPTVFLSNGSWNISLPESFSEIAPEYGTFTSRDEIFDKSRDASTLARIYSAYLSKHLQEHSGVRQSAHVGALIIEPVIHGAGGMHMVDPLFQRVLVNECRNRKIPVIFDEVFTGFWRLGVETTTELLGCKPDIACFAKLLTGGMVPLAVTLATDAVFDSFSGDSKLKALLHGHSYSAHAMGCATAAKAIQWFKDPETNHNITSQGKTLRELWDEELVQQISSHSAVQRVVVIGTLFALELKADASNSGYASLYAKSLLIMLREDGIFTRPLGNVIYLMCGPCTSPEICRRLLTKLYKRLGEFNRT

SEQ ID NO: 448 - protein, 812 aa, synthetic construct
  source 1..812: note = Arabidopsis thaliana BioDA DELTAMTP protein R756K
MKSTSVSPFHLPLNHPTYLIWSANTSLGKTLVSTGIAASFLLQQPSSSATKLLYLKPIQTGFPSDSDSRFVFSKLDSLSLRRQIPISISNSVLHSSLPAAKSLGLNVEVSESGMCSLNFRDEKTVTGAPELLCKTLYAWEAAISPHLAAERENATVEDSVVLQMIEKCLKEEMECGVKSEKSDLLCLVETAGGVASPGPSGTLQCDLYRPFRLPGILVGDGRLGGISGTIAAYESLKLRGYDIAAVVFEDHGLVNEVPLTSYLRNKVPVLVLPPVPKDPSDDLIEWFVESDGVFKALKETMVLANLERLERLNGMAKLAGEVFWWPFTQHKLVHQETVTVIDSRCGENFSIYKASDNSSLSQQFDACASWWTQGPDPTFQAELAREMGYTAARFGHVMFPENVYEPALKCAELLLDGVGKGWASRVYFSDNGSTAIEIALKMAFRKFCVDHNFCEATEEEKHIVVKVIALRGSYHGDTLGAMEAQAPSPYTGFLQQPWYTGRGLFLDPPTVFLSNGSWNISLPESFSEIAPEYGTFTSRDEIFDKSRDASTLARIYSAYLSKHLQEHSGVRQSAHVGALIIEPVIHGAGGMHMVDPLFQRVLVNECRNRKIPVIFDEVFTGFWRLGVETTTELLGCKPDIACFAKLLTGGMVPLAVTLATDAVFDSFSGDSKLKALLHGHSYSAHAMGCATAAKAIQWFKDPETNHNITSQGKTLRELWDEELVQQISSHSAVQKVVVIGTLFALELKADASNSGYASLYAKSLLIMLREDGIFTRPLGNVIYLMCGPCTSPEICRRLLTKLYKRLGEFNRT

SEQ ID NO: 449 - protein, 812 aa, synthetic construct
  source 1..812: note = Arabidopsis thaliana BioDA DELTAMTP protein R790C
MKSTSVSPFHLPLNHPTYLIWSANTSLGKTLVSTGIAASFLLQQPSSSATKLLYLKPIQTGFPSDSDSRFVFSKLDSLSLRRQIPISISNSVLHSSLPAAKSLGLNVEVSESGMCSLNFRDEKTVTGAPELLCKTLYAWEAAISPHLAAERENATVEDSVVLQMIEKCLKEEMECGVKSEKSDLLCLVETAGGVASPGPSGTLQCDLYRPFRLPGILVGDGRLGGISGTIAAYESLKLRGYDIAAVVFEDHGLVNEVPLTSYLRNKVPVLVLPPVPKDPSDDLIEWFVESDGVFKALKETMVLANLERLERLNGMAKLAGEVFWWPFTQHKLVHQETVTVIDSRCGENFSIYKASDNSSLSQQFDACASWWTQGPDPTFQAELAREMGYTAARFGHVMFPENVYEPALKCAELLLDGVGKGWASRVYFSDNGSTAIEIALKMAFRKFCVDHNFCEATEEEKHIVVKVIALRGSYHGDTLGAMEAQAPSPYTGFLQQPWYTGRGLFLDPPTVFLSNGSWNISLPESFSEIAPEYGTFTSRDEIFDKSRDASTLARIYSAYLSKHLQEHSGVRQSAHVGALIIEPVIHGAGGMHMVDPLFQRVLVNECRNRKIPVIFDEVFTGFWRLGVETTTELLGCKPDIACFAKLLTGGMVPLAVTLATDAVFDSFSGDSKLKALLHGHSYSAHAMGCATAAKAIQWFKDPETNHNITSQGKTLRELWDEELVQQISSHSAVQRVVVIGTLFALELKADASNSGYASLYAKSLLIMLCEDGIFTRPLGNVIYLMCGPCTSPEICRRLLTKLYKRLGEFNRT

SEQ ID NO: 450 - protein, 812 aa, synthetic construct
  source 1..812: note = Arabidopsis thaliana BioDA DELTAMTP protein R797Q
MKSTSVSPFHLPLNHPTYLIWSANTSLGKTLVSTGIAASFLLQQPSSSATKLLYLKPIQTGFPSDSDSRFVFSKLDSLSLRRQIPISISNSVLHSSLPAAKSLGLNVEVSESGMCSLNFRDEKTVTGAPELLCKTLYAWEAAISPHLAAERENATVEDSVVLQMIEKCLKEEMECGVKSEKSDLLCLVETAGGVASPGPSGTLQCDLYRPFRLPGILVGDGRLGGISGTIAAYESLKLRGYDIAAVVFEDHGLVNEVPLTSYLRNKVPVLVLPPVPKDPSDDLIEWFVESDGVFKALKETMVLANLERLERLNGMAKLAGEVFWWPFTQHKLVHQETVTVIDSRCGENFSIYKASDNSSLSQQFDACASWWTQGPDPTFQAELAREMGYTAARFGHVMFPENVYEPALKCAELLLDGVGKGWASRVYFSDNGSTAIEIALKMAFRKFCVDHNFCEATEEEKHIVVKVIALRGSYHGDTLGAMEAQAPSPYTGFLQQPWYTGRGLFLDPPTVFLSNGSWNISLPESFSEIAPEYGTFTSRDEIFDKSRDASTLARIYSAYLSKHLQEHSGVRQSAHVGALIIEPVIHGAGGMHMVDPLFQRVLVNECRNRKIPVIFDEVFTGFWRLGVETTTELLGCKPDIACFAKLLTGGMVPLAVTLATDAVFDSFSGDSKLKALLHGHSYSAHAMGCATAAKAIQWFKDPETNHNITSQGKTLRELWDEELVQQISSHSAVQRVVVIGTLFALELKADASNSGYASLYAKSLLIMLREDGIFTQPLGNVIYLMCGPCTSPEICRRLLTKLYKRLGEFNRT

SEQ ID NO: 451 - protein, 812 aa, synthetic construct
  source 1..812: note = Arabidopsis thaliana BioDA DELTAMTP protein S390C
MKSTSVSPFHLPLNHPTYLIWSANTSLGKTLVSTGIAASFLLQQPSSSATKLLYLKPIQTGFPSDSDSRFVFSKLDSLSLRRQIPISISNSVLHSSLPAAKSLGLNVEVSESGMCSLNFRDEKTVTGAPELLCKTLYAWEAAISPHLAAERENATVEDSVVLQMIEKCLKEEMECGVKSEKSDLLCLVETAGGVASPGPSGTLQCDLYRPFRLPGILVGDGRLGGISGTIAAYESLKLRGYDIAAVVFEDHGLVNEVPLTSYLRNKVPVLVLPPVPKDPSDDLIEWFVESDGVFKALKETMVLANLERLERLNGMAKLAGEVFWWPFTQHKLVHQETVTVIDSRCGENFSIYKASDNSSLSQQFDACACWWTQGPDPTFQAELAREMGYTAARFGHVMFPENVYEPALKCAELLLDGVGKGWASRVYFSDNGSTAIEIALKMAFRKFCVDHNFCEATEEEKHIVVKVIALRGSYHGDTLGAMEAQAPSPYTGFLQQPWYTGRGLFLDPPTVFLSNGSWNISLPESFSEIAPEYGTFTSRDEIFDKSRDASTLARIYSAYLSKHLQEHSGVRQSAHVGALIIEPVIHGAGGMHMVDPLFQRVLVNECRNRKIPVIFDEVFTGFWRLGVETTTELLGCKPDIACFAKLLTGGMVPLAVTLATDAVFDSFSGDSKLKALLHGHSYSAHAMGCATAAKAIQWFKDPETNHNITSQGKTLRELWDEELVQQISSHSAVQRVVVIGTLFALELKADASNSGYASLYAKSLLIMLREDGIFTRPLGNVIYLMCGPCTSPEICRRLLTKLYKRLGEFNRT

SEQ ID NO: 452 - protein, 812 aa, synthetic construct
  source 1..812: note = Arabidopsis thaliana BioDA DELTAMTP protein S494A
MKSTSVSPFHLPLNHPTYLIWSANTSLGKTLVSTGIAASFLLQQPSSSATKLLYLKPIQTGFPSDSDSRFVFSKLDSLSLRRQIPISISNSVLHSSLPAAKSLGLNVEVSESGMCSLNFRDEKTVTGAPELLCKTLYAWEAAISPHLAAERENATVEDSVVLQMIEKCLKEEMECGVKSEKSDLLCLVETAGGVASPGPSGTLQCDLYRPFRLPGILVGDGRLGGISGTIAAYESLKLRGYDIAAVVFEDHGLVNEVPLTSYLRNKVPVLVLPPVPKDPSDDLIEWFVESDGVFKALKETMVLANLERLERLNGMAKLAGEVFWWPFTQHKLVHQETVTVIDSRCGENFSIYKASDNSSLSQQFDACASWWTQGPDPTFQAELAREMGYTAARFGHVMFPENVYEPALKCAELLLDGVGKGWASRVYFSDNGSTAIEIALKMAFRKFCVDHNFCEATEEEKHIVVKVIALRGAYHGDTLGAMEAQAPSPYTGFLQQPWYTGRGLFLDPPTVFLSNGSWNISLPESFSEIAPEYGTFTSRDEIFDKSRDASTLARIYSAYLSKHLQEHSGVRQSAHVGALIIEPVIHGAGGMHMVDPLFQRVLVNECRNRKIPVIFDEVFTGFWRLGVETTTELLGCKPDIACFAKLLTGGMVPLAVTLATDAVFDSFSGDSKLKALLHGHSYSAHAMGCATAAKAIQWFKDPETNHNITSQGKTLRELWDEELVQQISSHSAVQRVVVIGTLFALELKADASNSGYASLYAKSLLIMLREDGIFTRPLGNVIYLMCGPCTSPEICRRLLTKLYKRLGEFNRT

SEQ ID NO: 453 - protein, 812 aa, synthetic construct
  source 1..812: note = Arabidopsis thaliana BioDA DELTAMTP protein S509A
MKSTSVSPFHLPLNHPTYLIWSANTSLGKTLVSTGIAASFLLQQPSSSATKLLYLKPIQTGFPSDSDSRFVFSKLDSLSLRRQIPISISNSVLHSSLPAAKSLGLNVEVSESGMCSLNFRDEKTVTGAPELLCKTLYAWEAAISPHLAAERENATVEDSVVLQMIEKCLKEEMECGVKSEKSDLLCLVETAGGVASPGPSGTLQCDLYRPFRLPGILVGDGRLGGISGTIAAYESLKLRGYDIAAVVFEDHGLVNEVPLTSYLRNKVPVLVLPPVPKDPSDDLIEWFVESDGVFKALKETMVLANLERLERLNGMAKLAGEVFWWPFTQHKLVHQETVTVIDSRCGENFSIYKASDNSSLSQQFDACASWWTQGPDPTFQAELAREMGYTAARFGHVMFPENVYEPALKCAELLLDGVGKGWASRVYFSDNGSTAIEIALKMAFRKFCVDHNFCEATEEEKHIVVKVIALRGSYHGDTLGAMEAQAPAPYTGFLQQPWYTGRGLFLDPPTVFLSNGSWNISLPESFSEIAPEYGTFTSRDEIFDKSRDASTLARIYSAYLSKHLQEHSGVRQSAHVGALIIEPVIHGAGGMHMVDPLFQRVLVNECRNRKIPVIFDEVFTGFWRLGVETTTELLGCKPDIACFAKLLTGGMVPLAVTLATDAVFDSFSGDSKLKALLHGHSYSAHAMGCATAAKAIQWFKDPETNHNITSQGKTLRELWDEELVQQISSHSAVQRVVVIGTLFALELKADASNSGYASLYAKSLLIMLREDGIFTRPLGNVIYLMCGPCTSPEICRRLLTKLYKRLGEFNRT

SEQ ID NO: 454 - protein, 812 aa, synthetic construct
  source 1..812: note = Arabidopsis thaliana BioDA DELTAMTP protein S509F
MKSTSVSPFHLPLNHPTYLIWSANTSLGKTLVSTGIAASFLLQQPSSSATKLLYLKPIQTGFPSDSDSRFVFSKLDSLSLRRQIPISISNSVLHSSLPAAKSLGLNVEVSESGMCSLNFRDEKTVTGAPELLCKTLYAWEAAISPHLAAERENATVEDSVVLQMIEKCLKEEMECGVKSEKSDLLCLVETAGGVASPGPSGTLQCDLYRPFRLPGILVGDGRLGGISGTIAAYESLKLRGYDIAAVVFEDHGLVNEVPLTSYLRNKVPVLVLPPVPKDPSDDLIEWFVESDGVFKALKETMVLANLERLERLNGMAKLAGEVFWWPFTQHKLVHQETVTVIDSRCGENFSIYKASDNSSLSQQFDACASWWTQGPDPTFQAELAREMGYTAARFGHVMFPENVYEPALKCAELLLDGVGKGWASRVYFSDNGSTAIEIALKMAFRKFCVDHNFCEATEEEKHIVVKVIALRGSYHGDTLGAMEAQAPFPYTGFLQQPWYTGRGLFLDPPTVFLSNGSWNISLPESFSEIAPEYGTFTSRDEIFDKSRDASTLARIYSAYLSKHLQEHSGVRQSAHVGALIIEPVIHGAGGMHMVDPLFQRVLVNECRNRKIPVIFDEVFTGFWRLGVETTTELLGCKPDIACFAKLLTGGMVPLAVTLATDAVFDSFSGDSKLKALLHGHSYSAHAMGCATAAKAIQWFKDPETNHNITSQGKTLRELWDEELVQQISSHSAVQRVVVIGTLFALELKADASNSGYASLYAKSLLIMLREDGIFTRPLGNVIYLMCGPCTSPEICRRLLTKLYKRLGEFNRT

SEQ ID NO: 455 - protein, 812 aa, synthetic construct
  source 1..812: note = Arabidopsis thaliana BioDA DELTAMTP protein S509H
MKSTSVSPFHLPLNHPTYLIWSANTSLGKTLVSTGIAASFLLQQPSSSATKLLYLKPIQTGFPSDSDSRFVFSKLDSLSLRRQIPISISNSVLHSSLPAAKSLGLNVEVSESGMCSLNFRDEKTVTGAPELLCKTLYAWEAAISPHLAAERENATVEDSVVLQMIEKCLKEEMECGVKSEKSDLLCLVETAGGVASPGPSGTLQCDLYRPFRLPGILVGDGRLGGISGTIAAYESLKLRGYDIAAVVFEDHGLVNEVPLTSYLRNKVPVLVLPPVPKDPSDDLIEWFVESDGVFKALKETMVLANLERLERLNGMAKLAGEVFWWPFTQHKLVHQETVTVIDSRCGENFSIYKASDNSSLSQQFDACASWWTQGPDPTFQAELAREMGYTAARFGHVMFPENVYEPALKCAELLLDGVGKGWASRVYFSDNGSTAIEIALKMAFRKFCVDHNFCEATEEEKHIVVKVIALRGSYHGDTLGAMEAQAPHPYTGFLQQPWYTGRGLFLDPPTVFLSNGSWNISLPESFSEIAPEYGTFTSRDEIFDKSRDASTLARIYSAYLSKHLQEHSGVRQSAHVGALIIEPVIHGAGGMHMVDPLFQRVLVNECRNRKIPVIFDEVFTGFWRLGVETTTELLGCKPDIACFAKLLTGGMVPLAVTLATDAVFDSFSGDSKLKALLHGHSYSAHAMGCATAAKAIQWFKDPETNHNITSQGKTLRELWDEELVQQISSHSAVQRVVVIGTLFALELKADASNSGYASLYAKSLLIMLREDGIFTRPLGNVIYLMCGPCTSPEICRRLLTKLYKRLGEFNRT

SEQ ID NO: 456 - protein, 812 aa, synthetic construct
  source 1..812: note = Arabidopsis thaliana BioDA DELTAMTP protein S509I
MKSTSVSPFHLPLNHPTYLIWSANTSLGKTLVSTGIAASFLLQQPSSSATKLLYLKPIQTGFPSDSDSRFVFSKLDSLSLRRQIPISISNSVLHSSLPAAKSLGLNVEVSESGMCSLNFRDEKTVTGAPELLCKTLYAWEAAISPHLAAERENATVEDSVVLQMIEKCLKEEMECGVKSEKSDLLCLVETAGGVASPGPSGTLQCDLYRPFRLPGILVGDGRLGGISGTIAAYESLKLRGYDIAAVVFEDHGLVNEVPLTSYLRNKVPVLVLPPVPKDPSDDLIEWFVESDGVFKALKETMVLANLERLERLNGMAKLAGEVFWWPFTQHKLVHQETVTVIDSRCGENFSIYKASDNSSLSQQFDACASWWTQGPDPTFQAELAREMGYTAARFGHVMFPENVYEPALKCAELLLDGVGKGWASRVYFSDNGSTAIEIALKMAFRKFCVDHNFCEATEEEKHIVVKVIALRGSYHGDTLGAMEAQAPIPYTGFLQQPWYTGRGLFLDPPTVFLSNGSWNISLPESFSEIAPEYGTFTSRDEIFDKSRDASTLARIYSAYLSKHLQEHSGVRQSAHVGALIIEPVIHGAGGMHMVDPLFQRVLVNECRNRKIPVIFDEVFTGFWRLGVETTTELLGCKPDIACFAKLLTGGMVPLAVTLATDAVFDSFSGDSKLKALLHGHSYSAHAMGCATAAKAIQWFKDPETNHNITSQGKTLRELWDEELVQQISSHSAVQRVVVIGTLFALELKADASNSGYASLYAKSLLIMLREDGIFTRPLGNVIYLMCGPCTSPEICRRLLTKLYKRLGEFNRT

SEQ ID NO: 457 - protein, 812 aa, synthetic construct
  source 1..812: note = Arabidopsis thaliana BioDA DELTAMTP protein S509K
MKSTSVSPFHLPLNHPTYLIWSANTSLGKTLVSTGIAASFLLQQPSSSATKLLYLKPIQTGFPSDSDSRFVFSKLDSLSLRRQIPISISNSVLHSSLPAAKSLGLNVEVSESGMCSLNFRDEKTVTGAPELLCKTLYAWEAAISPHLAAERENATVEDSVVLQMIEKCLKEEMECGVKSEKSDLLCLVETAGGVASPGPSGTLQCDLYRPFRLPGILVGDGRLGGISGTIAAYESLKLRGYDIAAVVFEDHGLVNEVPLTSYLRNKVPVLVLPPVPKDPSDDLIEWFVESDGVFKALKETMVLANLERLERLNGMAKLAGEVFWWPFTQHKLVHQETVTVIDSRCGENFSIYKASDNSSLSQQFDACASWWTQGPDPTFQAELAREMGYTAARFGHVMFPENVYEPALKCAELLLDGVGKGWASRVYFSDNGSTAIEIALKMAFRKFCVDHNFCEATEEEKHIVVKVIALRGSYHGDTLGAMEAQAPKPYTGFLQQPWYTGRGLFLDPPTVFLSNGSWNISLPESFSEIAPEYGTFTSRDEIFDKSRDASTLARIYSAYLSKHLQEHSGVRQSAHVGALIIEPVIHGAGGMHMVDPLFQRVLVNECRNRKIPVIFDEVFTGFWRLGVETTTELLGCKPDIACFAKLLTGGMVPLAVTLATDAVFDSFSGDSKLKALLHGHSYSAHAMGCATAAKAIQWFKDPETNHNITSQGKTLRELWDEELVQQISSHSAVQRVVVIGTLFALELKADASNSGYASLYAKSLLIMLREDGIFTRPLGNVIYLMCGPCTSPEICRRLLTKLYKRLGEFNRT

SEQ ID NO: 458 - protein, 812 aa, synthetic construct
  source 1..812: note = Arabidopsis thaliana BioDA DELTAMTP protein S509L
MKSTSVSPFHLPLNHPTYLIWSANTSLGKTLVSTGIAASFLLQQPSSSATKLLYLKPIQTGFPSDSDSRFVFSKLDSLSLRRQIPISISNSVLHSSLPAAKSLGLNVEVSESGMCSLNFRDEKTVTGAPELLCKTLYAWEAAISPHLAAERENATVEDSVVLQMIEKCLKEEMECGVKSEKSDLLCLVETAGGVASPGPSGTLQCDLYRPFRLPGILVGDGRLGGISGTIAAYESLKLRGYDIAAVVFEDHGLVNEVPLTSYLRNKVPVLVLPPVPKDPSDDLIEWFVESDGVFKALKETMVLANLERLERLNGMAKLAGEVFWWPFTQHKLVHQETVTVIDSRCGENFSIYKASDNSSLSQQFDACASWWTQGPDPTFQAELAREMGYTAARFGHVMFPENVYEPALKCAELLLDGVGKGWASRVYFSDNGSTAIEIALKMAFRKFCVDHNFCEATEEEKHIVVKVIALRGSYHGDTLGAMEAQAPLPYTGFLQQPWYTGRGLFLDPPTVFLSNGSWNISLPESFSEIAPEYGTFTSRDEIFDKSRDASTLARIYSAYLSKHLQEHSGVRQSAHVGALIIEPVIHGAGGMHMVDPLFQRVLVNECRNRKIPVIFDEVFTGFWRLGVETTTELLGCKPDIACFAKLLTGGMVPLAVTLATDAVFDSFSGDSKLKALLHGHSYSAHAMGCATAAKAIQWFKDPETNHNITSQGKTLRELWDEELVQQISSHSAVQRVVVIGTLFALELKADASNSGYASLYAKSLLIMLREDGIFTRPLGNVIYLMCGPCTSPEICRRLLTKLYKRLGEFNRT

SEQ ID NO: 459 - protein, 812 aa, synthetic construct
  source 1..812: note = Arabidopsis thaliana BioDA DELTAMTP protein S509M
MKSTSVSPFHLPLNHPTYLIWSANTSLGKTLVSTGIAASFLLQQPSSSATKLLYLKPIQTGFPSDSDSRFVFSKLDSLSLRRQIPISISNSVLHSSLPAAKSLGLNVEVSESGMCSLNFRDEKTVTGAPELLCKTLYAWEAAISPHLAAERENATVEDSVVLQMIEKCLKEEMECGVKSEKSDLLCLVETAGGVASPGPSGTLQCDLYRPFRLPGILVGDGRLGGISGTIAAYESLKLRGYDIAAVVFEDHGLVNEVPLTSYLRNKVPVLVLPPVPKDPSDDLIEWFVESDGVFKALKETMVLANLERLERLNGMAKLAGEVFWWPFTQHKLVHQETVTVIDSRCGENFSIYKASDNSSLSQQFDACASWWTQGPDPTFQAELAREMGYTAARFGHVMFPENVYEPALKCAELLLDGVGKGWASRVYFSDNGSTAIEIALKMAFRKFCVDHNFCEATEEEKHIVVKVIALRGSYHGDTLGAMEAQAPMPYTGFLQQPWYTGRGLFLDPPTVFLSNGSWNISLPESFSEIAPEYGTFTSRDEIFDKSRDASTLARIYSAYLSKHLQEHSGVRQSAHVGALIIEPVIHGAGGMHMVDPLFQRVLVNECRNRKIPVIFDEVFTGFWRLGVETTTELLGCKPDIACFAKLLTGGMVPLAVTLATDAVFDSFSGDSKLKALLHGHSYSAHAMGCATAAKAIQWFKDPETNHNITSQGKTLRELWDEELVQQISSHSAVQRVVVIGTLFALELKADASNSGYASLYAKSLLIMLREDGIFTRPLGNVIYLMCGPCTSPEICRRLLTKLYKRLGEFNRT

SEQ ID NO: 460 - protein, 812 aa, synthetic construct
  source 1..812: note = Arabidopsis thaliana BioDA DELTAMTP protein S509N
MKSTSVSPFHLPLNHPTYLIWSANTSLGKTLVSTGIAASFLLQQPSSSATKLLYLKPIQTGFPSDSDSRFVFSKLDSLSLRRQIPISISNSVLHSSLPAAKSLGLNVEVSESGMCSLNFRDEKTVTGAPELLCKTLYAWEAAISPHLAAERENATVEDSVVLQMIEKCLKEEMECGVKSEKSDLLCLVETAGGVASPGPSGTLQCDLYRPFRLPGILVGDGRLGGISGTIAAYESLKLRGYDIAAVVFEDHGLVNEVPLTSYLRNKVPVLVLPPVPKDPSDDLIEWFVESDGVFKALKETMVLANLERLERLNGMAKLAGEVFWWPFTQHKLVHQETVTVIDSRCGENFSIYKASDNSSLSQQFDACASWWTQGPDPTFQAELAREMGYTAARFGHVMFPENVYEPALKCAELLLDGVGKGWASRVYFSDNGSTAIEIALKMAFRKFCVDHNFCEATEEEKHIVVKVIALRGSYHGDTLGAMEAQAPNPYTGFLQQPWYTGRGLFLDPPTVFLSNGSWNISLPESFSEIAPEYGTFTSRDEIFDKSRDASTLARIYSAYLSKHLQEHSGVRQSAHVGALIIEPVIHGAGGMHMVDPLFQRVLVNECRNRKIPVIFDEVFTGFWRLGVETTTELLGCKPDIACFAKLLTGGMVPLAVTLATDAVFDSFSGDSKLKALLHGHSYSAHAMGCATAAKAIQWFKDPETNHNITSQGKTLRELWDEELVQQISSHSAVQRVVVIGTLFALELKADASNSGYASLYAKSLLIMLREDGIFTRPLGNVIYLMCGPCTSPEICRRLLTKLYKRLGEFNRT

SEQ ID NO: 461 - protein, 812 aa, synthetic construct
  source 1..812: note = Arabidopsis thaliana BioDA DELTAMTP protein S509Q
MKSTSVSPFHLPLNHPTYLIWSANTSLGKTLVSTGIAASFLLQQPSSSATKLLYLKPIQTGFPSDSDSRFVFSKLDSLSLRRQIPISISNSVLHSSLPAAKSLGLNVEVSESGMCSLNFRDEKTVTGAPELLCKTLYAWEAAISPHLAAERENATVEDSVVLQMIEKCLKEEMECGVKSEKSDLLCLVETAGGVASPGPSGTLQCDLYRPFRLPGILVGDGRLGGISGTIAAYESLKLRGYDIAAVVFEDHGLVNEVPLTSYLRNKVPVLVLPPVPKDPSDDLIEWFVESDGVFKALKETMVLANLERLERLNGMAKLAGEVFWWPFTQHKLVHQETVTVIDSRCGENFSIYKASDNSSLSQQFDACASWWTQGPDPTFQAELAREMGYTAARFGHVMFPENVYEPALKCAELLLDGVGKGWASRVYFSDNGSTAIEIALKMAFRKFCVDHNFCEATEEEKHIVVKVIALRGSYHGDTLGAMEAQAPQPYTGFLQQPWYTGRGLFLDPPTVFLSNGSWNISLPESFSEIAPEYGTFTSRDEIFDKSRDASTLARIYSAYLSKHLQEHSGVRQSAHVGALIIEPVIHGAGGMHMVDPLFQRVLVNECRNRKIPVIFDEVFTGFWRLGVETTTELLGCKPDIACFAKLLTGGMVPLAVTLATDAVFDSFSGDSKLKALLHGHSYSAHAMGCATAAKAIQWFKDPETNHNITSQGKTLRELWDEELVQQISSHSAVQRVVVIGTLFALELKADASNSGYASLYAKSLLIMLREDGIFTRPLGNVIYLMCGPCTSPEICRRLLTKLYKRLGEFNRT

SEQ ID NO: 462 - protein, 812 aa, synthetic construct
  source 1..812: note = Arabidopsis thaliana BioDA DELTAMTP protein S509R
MKSTSVSPFHLPLNHPTYLIWSANTSLGKTLVSTGIAASFLLQQPSSSATKLLYLKPIQTGFPSDSDSRFVFSKLDSLSLRRQIPISISNSVLHSSLPAAKSLGLNVEVSESGMCSLNFRDEKTVTGAPELLCKTLYAWEAAISPHLAAERENATVEDSVVLQMIEKCLKEEMECGVKSEKSDLLCLVETAGGVASPGPSGTLQCDLYRPFRLPGILVGDGRLGGISGTIAAYESLKLRGYDIAAVVFEDHGLVNEVPLTSYLRNKVPVLVLPPVPKDPSDDLIEWFVESDGVFKALKETMVLANLERLERLNGMAKLAGEVFWWPFTQHKLVHQETVTVIDSRCGENFSIYKASDNSSLSQQFDACASWWTQGPDPTFQAELAREMGYTAARFGHVMFPENVYEPALKCAELLLDGVGKGWASRVYFSDNGSTAIEIALKMAFRKFCVDHNFCEATEEEKHIVVKVIALRGSYHGDTLGAMEAQAPRPYTGFLQQPWYTGRGLFLDPPTVFLSNGSWNISLPESFSEIAPEYGTFTSRDEIFDKSRDASTLARIYSAYLSKHLQEHSGVRQSAHVGALIIEPVIHGAGGMHMVDPLFQRVLVNECRNRKIPVIFDEVFTGFWRLGVETTTELLGCKPDIACFAKLLTGGMVPLAVTLATDAVFDSFSGDSKLKALLHGHSYSAHAMGCATAAKAIQWFKDPETNHNITSQGKTLRELWDEELVQQISSHSAVQRVVVIGTLFALELKADASNSGYASLYAKSLLIMLREDGIFTRPLGNVIYLMCGPCTSPEICRRLLTKLYKRLGEFNRT

SEQ ID NO: 463 - protein, 812 aa, synthetic construct
  source 1..812: note = Arabidopsis thaliana BioDA DELTAMTP protein S509T
MKSTSVSPFHLPLNHPTYLIWSANTSLGKTLVSTGIAASFLLQQPSSSATKLLYLKPIQTGFPSDSDSRFVFSKLDSLSLRRQIPISISNSVLHSSLPAAKSLGLNVEVSESGMCSLNFRDEKTVTGAPELLCKTLYAWEAAISPHLAAERENATVEDSVVLQMIEKCLKEEMECGVKSEKSDLLCLVETAGGVASPGPSGTLQCDLYRPFRLPGILVGDGRLGGISGTIAAYESLKLRGYDIAAVVFEDHGLVNEVPLTSYLRNKVPVLVLPPVPKDPSDDLIEWFVESDGVFKALKETMVLANLERLERLNGMAKLAGEVFWWPFTQHKLVHQETVTVIDSRCGENFSIYKASDNSSLSQQFDACASWWTQGPDPTFQAELAREMGYTAARFGHVMFPENVYEPALKCAELLLDGVGKGWASRVYFSDNGSTAIEIALKMAFRKFCVDHNFCEATEEEKHIVVKVIALRGSYHGDTLGAMEAQAPTPYTGFLQQPWYTGRGLFLDPPTVFLSNGSWNISLPESFSEIAPEYGTFTSRDEIFDKSRDASTLARIYSAYLSKHLQEHSGVRQSAHVGALIIEPVIHGAGGMHMVDPLFQRVLVNECRNRKIPVIFDEVFTGFWRLGVETTTELLGCKPDIACFAKLLTGGMVPLAVTLATDAVFDSFSGDSKLKALLHGHSYSAHAMGCATAAKAIQWFKDPETNHNITSQGKTLRELWDEELVQQISSHSAVQRVVVIGTLFALELKADASNSGYASLYAKSLLIMLREDGIFTRPLGNVIYLMCGPCTSPEICRRLLTKLYKRLGEFNRT

SEQ ID NO: 464 - protein, 812 aa, synthetic construct
  source 1..812: note = Arabidopsis thaliana BioDA DELTAMTP protein S509Y
MKSTSVSPFHLPLNHPTYLIWSANTSLGKTLVSTGIAASFLLQQPSSSATKLLYLKPIQTGFPSDSDSRFVFSKLDSLSLRRQIPISISNSVLHSSLPAAKSLGLNVEVSESGMCSLNFRDEKTVTGAPELLCKTLYAWEAAISPHLAAERENATVEDSVVLQMIEKCLKEEMECGVKSEKSDLLCLVETAGGVASPGPSGTLQCDLYRPFRLPGILVGDGRLGGISGTIAAYESLKLRGYDIAAVVFEDHGLVNEVPLTSYLRNKVPVLVLPPVPKDPSDDLIEWFVESDGVFKALKETMVLANLERLERLNGMAKLAGEVFWWPFTQHKLVHQETVTVIDSRCGENFSIYKASDNSSLSQQFDACASWWTQGPDPTFQAELAREMGYTAARFGHVMFPENVYEPALKCAELLLDGVGKGWASRVYFSDNGSTAIEIALKMAFRKFCVDHNFCEATEEEKHIVVKVIALRGSYHGDTLGAMEAQAPYPYTGFLQQPWYTGRGLFLDPPTVFLSNGSWNISLPESFSEIAPEYGTFTSRDEIFDKSRDASTLARIYSAYLSKHLQEHSGVRQSAHVGALIIEPVIHGAGGMHMVDPLFQRVLVNECRNRKIPVIFDEVFTGFWRLGVETTTELLGCKPDIACFAKLLTGGMVPLAVTLATDAVFDSFSGDSKLKALLHGHSYSAHAMGCATAAKAIQWFKDPETNHNITSQGKTLRELWDEELVQQISSHSAVQRVVVIGTLFALELKADASNSGYASLYAKSLLIMLREDGIFTRPLGNVIYLMCGPCTSPEICRRLLTKLYKRLGEFNRT

SEQ ID NO: 465 - protein, 812 aa, synthetic construct
  source 1..812: note = Arabidopsis thaliana BioDA DELTAMTP protein S704P
MKSTSVSPFHLPLNHPTYLIWSANTSLGKTLVSTGIAASFLLQQPSSSATKLLYLKPIQTGFPSDSDSRFVFSKLDSLSLRRQIPISISNSVLHSSLPAAKSLGLNVEVSESGMCSLNFRDEKTVTGAPELLCKTLYAWEAAISPHLAAERENATVEDSVVLQMIEKCLKEEMECGVKSEKSDLLCLVETAGGVASPGPSGTLQCDLYRPFRLPGILVGDGRLGGISGTIAAYESLKLRGYDIAAVVFEDHGLVNEVPLTSYLRNKVPVLVLPPVPKDPSDDLIEWFVESDGVFKALKETMVLANLERLERLNGMAKLAGEVFWWPFTQHKLVHQETVTVIDSRCGENFSIYKASDNSSLSQQFDACASWWTQGPDPTFQAELAREMGYTAARFGHVMFPENVYEPALKCAELLLDGVGKGWASRVYFSDNGSTAIEIALKMAFRKFCVDHNFCEATEEEKHIVVKVIALRGSYHGDTLGAMEAQAPSPYTGFLQQPWYTGRGLFLDPPTVFLSNGSWNISLPESFSEIAPEYGTFTSRDEIFDKSRDASTLARIYSAYLSKHLQEHSGVRQSAHVGALIIEPVIHGAGGMHMVDPLFQRVLVNECRNRKIPVIFDEVFTGFWRLGVETTTELLGCKPDIACFAKLLTGGMVPLAVTLATDAVFDSFSGDSKLKALLHGHSYPAHAMGCATAAKAIQWFKDPETNHNITSQGKTLRELWDEELVQQISSHSAVQRVVVIGTLFALELKADASNSGYASLYAKSLLIMLREDGIFTRPLGNVIYLMCGPCTSPEICRRLLTKLYKRLGEFNRT

SEQ ID NO: 466 - protein, 812 aa, synthetic construct
  source 1..812: note = Arabidopsis thaliana BioDA DELTAMTP protein T393V
MKSTSVSPFHLPLNHPTYLIWSANTSLGKTLVSTGIAASFLLQQPSSSATKLLYLKPIQTGFPSDSDSRFVFSKLDSLSLRRQIPISISNSVLHSSLPAAKSLGLNVEVSESGMCSLNFRDEKTVTGAPELLCKTLYAWEAAISPHLAAERENATVEDSVVLQMIEKCLKEEMECGVKSEKSDLLCLVETAGGVASPGPSGTLQCDLYRPFRLPGILVGDGRLGGISGTIAAYESLKLRGYDIAAVVFEDHGLVNEVPLTSYLRNKVPVLVLPPVPKDPSDDLIEWFVESDGVFKALKETMVLANLERLERLNGMAKLAGEVFWWPFTQHKLVHQETVTVIDSRCGENFSIYKASDNSSLSQQFDACASWWVQGPDPTFQAELAREMGYTAARFGHVMFPENVYEPALKCAELLLDGVGKGWASRVYFSDNGSTAIEIALKMAFRKFCVDHNFCEATEEEKHIVVKVIALRGSYHGDTLGAMEAQAPSPYTGFLQQPWYTGRGLFLDPPTVFLSNGSWNISLPESFSEIAPEYGTFTSRDEIFDKSRDASTLARIYSAYLSKHLQEHSGVRQSAHVGALIIEPVIHGAGGMHMVDPLFQRVLVNECRNRKIPVIFDEVFTGFWRLGVETTTELLGCKPDIACFAKLLTGGMVPLAVTLATDAVFDSFSGDSKLKALLHGHSYSAHAMGCATAAKAIQWFKDPETNHNITSQGKTLRELWDEELVQQISSHSAVQRVVVIGTLFALELKADASNSGYASLYAKSLLIMLREDGIFTRPLGNVIYLMCGPCTSPEICRRLLTKLYKRLGEFNRT

SEQ ID NO: 467 - protein, 812 aa, synthetic construct
  source 1..812: note = Arabidopsis thaliana BioDA DELTAMTP protein T512G
MKSTSVSPFHLPLNHPTYLIWSANTSLGKTLVSTGIAASFLLQQPSSSATKLLYLKPIQTGFPSDSDSRFVFSKLDSLSLRRQIPISISNSVLHSSLPAAKSLGLNVEVSESGMCSLNFRDEKTVTGAPELLCKTLYAWEAAISPHLAAERENATVEDSVVLQMIEKCLKEEMECGVKSEKSDLLCLVETAGGVASPGPSGTLQCDLYRPFRLPGILVGDGRLGGISGTIAAYESLKLRGYDIAAVVFEDHGLVNEVPLTSYLRNKVPVLVLPPVPKDPSDDLIEWFVESDGVFKALKETMVLANLERLERLNGMAKLAGEVFWWPFTQHKLVHQETVTVIDSRCGENFSIYKASDNSSLSQQFDACASWWTQGPDPTFQAELAREMGYTAARFGHVMFPENVYEPALKCAELLLDGVGKGWASRVYFSDNGSTAIEIALKMAFRKFCVDHNFCEATEEEKHIVVKVIALRGSYHGDTLGAMEAQAPSPYGGFLQQPWYTGRGLFLDPPTVFLSNGSWNISLPESFSEIAPEYGTFTSRDEIFDKSRDASTLARIYSAYLSKHLQEHSGVRQSAHVGALIIEPVIHGAGGMHMVDPLFQRVLVNECRNRKIPVIFDEVFTGFWRLGVETTTELLGCKPDIACFAKLLTGGMVPLAVTLATDAVFDSFSGDSKLKALLHGHSYSAHAMGCATAAKAIQWFKDPETNHNITSQGKTLRELWDEELVQQISSHSAVQRVVVIGTLFALELKADASNSGYASLYAKSLLIMLREDGIFTRPLGNVIYLMCGPCTSPEICRRLLTKLYKRLGEFNRT

SEQ ID NO: 468 - protein, 812 aa, synthetic construct
  source 1..812: note = Arabidopsis thaliana BioDA DELTAMTP protein T512I
MKSTSVSPFHLPLNHPTYLIWSANTSLGKTLVSTGIAASFLLQQPSSSATKLLYLKPIQTGFPSDSDSRFVFSKLDSLSLRRQIPISISNSVLHSSLPAAKSLGLNVEVSESGMCSLNFRDEKTVTGAPELLCKTLYAWEAAISPHLAAERENATVEDSVVLQMIEKCLKEEMECGVKSEKSDLLCLVETAGGVASPGPSGTLQCDLYRPFRLPGILVGDGRLGGISGTIAAYESLKLRGYDIAAVVFEDHGLVNEVPLTSYLRNKVPVLVLPPVPKDPSDDLIEWFVESDGVFKALKETMVLANLERLERLNGMAKLAGEVFWWPFTQHKLVHQETVTVIDSRCGENFSIYKASDNSSLSQQFDACASWWTQGPDPTFQAELAREMGYTAARFGHVMFPENVYEPALKCAELLLDGVGKGWASRVYFSDNGSTAIEIALKMAFRKFCVDHNFCEATEEEKHIVVKVIALRGSYHGDTLGAMEAQAPSPYIGFLQQPWYTGRGLFLDPPTVFLSNGSWNISLPESFSEIAPEYGTFTSRDEIFDKSRDASTLARIYSAYLSKHLQEHSGVRQSAHVGALIIEPVIHGAGGMHMVDPLFQRVLVNECRNRKIPVIFDEVFTGFWRLGVETTTELLGCKPDIACFAKLLTGGMVPLAVTLATDAVFDSFSGDSKLKALLHGHSYSAHAMGCATAAKAIQWFKDPETNHNITSQGKTLRELWDEELVQQISSHSAVQRVVVIGTLFALELKADASNSGYASLYAKSLLIMLREDGIFTRPLGNVIYLMCGPCTSPEICRRLLTKLYKRLGEFNRT

SEQ ID NO: 469 - protein, 812 aa, synthetic construct
  source 1..812: note = Arabidopsis thaliana BioDA DELTAMTP protein T512N
MKSTSVSPFHLPLNHPTYLIWSANTSLGKTLVSTGIAASFLLQQPSSSATKLLYLKPIQTGFPSDSDSRFVFSKLDSLSLRRQIPISISNSVLHSSLPAAKSLGLNVEVSESGMCSLNFRDEKTVTGAPELLCKTLYAWEAAISPHLAAERENATVEDSVVLQMIEKCLKEEMECGVKSEKSDLLCLVETAGGVASPGPSGTLQCDLYRPFRLPGILVGDGRLGGISGTIAAYESLKLRGYDIAAVVFEDHGLVNEVPLTSYLRNKVPVLVLPPVPKDPSDDLIEWFVESDGVFKALKETMVLANLERLERLNGMAKLAGEVFWWPFTQHKLVHQETVTVIDSRCGENFSIYKASDNSSLSQQFDACASWWTQGPDPTFQAELAREMGYTAARFGHVMFPENVYEPALKCAELLLDGVGKGWASRVYFSDNGSTAIEIALKMAFRKFCVDHNFCEATEEEKHIVVKVIALRGSYHGDTLGAMEAQAPSPYNGFLQQPWYTGRGLFLDPPTVFLSNGSWNISLPESFSEIAPEYGTFTSRDEIFDKSRDASTLARIYSAYLSKHLQEHSGVRQSAHVGALIIEPVIHGAGGMHMVDPLFQRVLVNECRNRKIPVIFDEVFTGFWRLGVETTTELLGCKPDIACFAKLLTGGMVPLAVTLATDAVFDSFSGDSKLKALLHGHSYSAHAMGCATAAKAIQWFKDPETNHNITSQGKTLRELWDEELVQQISSHSAVQRVVVIGTLFALELKADASNSGYASLYAKSLLIMLREDGIFTRPLGNVIYLMCGPCTSPEICRRLLTKLYKRLGEFNRT

SEQ ID NO: 470 - protein, 812 aa, synthetic construct
  source 1..812: note = Arabidopsis thaliana BioDA DELTAMTP protein T512W
MKSTSVSPFHLPLNHPTYLIWSANTSLGKTLVSTGIAASFLLQQPSSSATKLLYLKPIQTGFPSDSDSRFVFSKLDSLSLRRQIPISISNSVLHSSLPAAKSLGLNVEVSESGMCSLNFRDEKTVTGAPELLCKTLYAWEAAISPHLAAERENATVEDSVVLQMIEKCLKEEMECGVKSEKSDLLCLVETAGGVASPGPSGTLQCDLYRPFRLPGILVGDGRLGGISGTIAAYESLKLRGYDIAAVVFEDHGLVNEVPLTSYLRNKVPVLVLPPVPKDPSDDLIEWFVESDGVFKALKETMVLANLERLERLNGMAKLAGEVFWWPFTQHKLVHQETVTVIDSRCGENFSIYKASDNSSLSQQFDACASWWTQGPDPTFQAELAREMGYTAARFGHVMFPENVYEPALKCAELLLDGVGKGWASRVYFSDNGSTAIEIALKMAFRKFCVDHNFCEATEEEKHIVVKVIALRGSYHGDTLGAMEAQAPSPYWGFLQQPWYTGRGLFLDPPTVFLSNGSWNISLPESFSEIAPEYGTFTSRDEIFDKSRDASTLARIYSAYLSKHLQEHSGVRQSAHVGALIIEPVIHGAGGMHMVDPLFQRVLVNECRNRKIPVIFDEVFTGFWRLGVETTTELLGCKPDIACFAKLLTGGMVPLAVTLATDAVFDSFSGDSKLKALLHGHSYSAHAMGCATAAKAIQWFKDPETNHNITSQGKTLRELWDEELVQQISSHSAVQRVVVIGTLFALELKADASNSGYASLYAKSLLIMLREDGIFTRPLGNVIYLMCGPCTSPEICRRLLTKLYKRLGEFNRT

SEQ ID NO: 471 - protein, 812 aa, synthetic construct
  source 1..812: note = Arabidopsis thaliana BioDA DELTAMTP protein V354A
MKSTSVSPFHLPLNHPTYLIWSANTSLGKTLVSTGIAASFLLQQPSSSATKLLYLKPIQTGFPSDSDSRFVFSKLDSLSLRRQIPISISNSVLHSSLPAAKSLGLNVEVSESGMCSLNFRDEKTVTGAPELLCKTLYAWEAAISPHLAAERENATVEDSVVLQMIEKCLKEEMECGVKSEKSDLLCLVETAGGVASPGPSGTLQCDLYRPFRLPGILVGDGRLGGISGTIAAYESLKLRGYDIAAVVFEDHGLVNEVPLTSYLRNKVPVLVLPPVPKDPSDDLIEWFVESDGVFKALKETMVLANLERLERLNGMAKLAGEVFWWPFTQHKLAHQETVTVIDSRCGENFSIYKASDNSSLSQQFDACASWWTQGPDPTFQAELAREMGYTAARFGHVMFPENVYEPALKCAELLLDGVGKGWASRVYFSDNGSTAIEIALKMAFRKFCVDHNFCEATEEEKHIVVKVIALRGSYHGDTLGAMEAQAPSPYTGFLQQPWYTGRGLFLDPPTVFLSNGSWNISLPESFSEIAPEYGTFTSRDEIFDKSRDASTLARIYSAYLSKHLQEHSGVRQSAHVGALIIEPVIHGAGGMHMVDPLFQRVLVNECRNRKIPVIFDEVFTGFWRLGVETTTELLGCKPDIACFAKLLTGGMVPLAVTLATDAVFDSFSGDSKLKALLHGHSYSAHAMGCATAAKAIQWFKDPETNHNITSQGKTLRELWDEELVQQISSHSAVQRVVVIGTLFALELKADASNSGYASLYAKSLLIMLREDGIFTRPLGNVIYLMCGPCTSPEICRRLLTKLYKRLGEFNRT

SEQ ID NO: 472 - protein, 812 aa, synthetic construct
  source 1..812: note = Arabidopsis thaliana BioDA DELTAMTP protein V354E
MKSTSVSPFHLPLNHPTYLIWSANTSLGKTLVSTGIAASFLLQQPSSSATKLLYLKPIQTGFPSDSDSRFVFSKLDSLSLRRQIPISISNSVLHSSLPAAKSLGLNVEVSESGMCSLNFRDEKTVTGAPELLCKTLYAWEAAISPHLAAERENATVEDSVVLQMIEKCLKEEMECGVKSEKSDLLCLVETAGGVASPGPSGTLQCDLYRPFRLPGILVGDGRLGGISGTIAAYESLKLRGYDIAAVVFEDHGLVNEVPLTSYLRNKVPVLVLPPVPKDPSDDLIEWFVESDGVFKALKETMVLANLERLERLNGMAKLAGEVFWWPFTQHKLEHQETVTVIDSRCGENFSIYKASDNSSLSQQFDACASWWTQGPDPTFQAELAREMGYTAARFGHVMFPENVYEPALKCAELLLDGVGKGWASRVYFSDNGSTAIEIALKMAFRKFCVDHNFCEATEEEKHIVVKVIALRGSYHGDTLGAMEAQAPSPYTGFLQQPWYTGRGLFLDPPTVFLSNGSWNISLPESFSEIAPEYGTFTSRDEIFDKSRDASTLARIYSAYLSKHLQEHSGVRQSAHVGALIIEPVIHGAGGMHMVDPLFQRVLVNECRNRKIPVIFDEVFTGFWRLGVETTTELLGCKPDIACFAKLLTGGMVPLAVTLATDAVFDSFSGDSKLKALLHGHSYSAHAMGCATAAKAIQWFKDPETNHNITSQGKTLRELWDEELVQQISSHSAVQRVVVIGTLFALELKADASNSGYASLYAKSLLIMLREDGIFTRPLGNVIYLMCGPCTSPEICRRLLTKLYKRLGEFNRT

SEQ ID NO: 473 - protein, 812 aa, synthetic construct
  source 1..812: note = Arabidopsis thaliana BioDA DELTAMTP protein V354L
MKSTSVSPFHLPLNHPTYLIWSANTSLGKTLVSTGIAASFLLQQPSSSATKLLYLKPIQTGFPSDSDSRFVFSKLDSLSLRRQIPISISNSVLHSSLPAAKSLGLNVEVSESGMCSLNFRDEKTVTGAPELLCKTLYAWEAAISPHLAAERENATVEDSVVLQMIEKCLKEEMECGVKSEKSDLLCLVETAGGVASPGPSGTLQCDLYRPFRLPGILVGDGRLGGISGTIAAYESLKLRGYDIAAVVFEDHGLVNEVPLTSYLRNKVPVLVLPPVPKDPSDDLIEWFVESDGVFKALKETMVLANLERLERLNGMAKLAGEVFWWPFTQHKLLHQETVTVIDSRCGENFSIYKASDNSSLSQQFDACASWWTQGPDPTFQAELAREMGYTAARFGHVMFPENVYEPALKCAELLLDGVGKGWASRVYFSDNGSTAIEIALKMAFRKFCVDHNFCEATEEEKHIVVKVIALRGSYHGDTLGAMEAQAPSPYTGFLQQPWYTGRGLFLDPPTVFLSNGSWNISLPESFSEIAPEYGTFTSRDEIFDKSRDASTLARIYSAYLSKHLQEHSGVRQSAHVGALIIEPVIHGAGGMHMVDPLFQRVLVNECRNRKIPVIFDEVFTGFWRLGVETTTELLGCKPDIACFAKLLTGGMVPLAVTLATDAVFDSFSGDSKLKALLHGHSYSAHAMGCATAAKAIQWFKDPETNHNITSQGKTLRELWDEELVQQISSHSAVQRVVVIGTLFALELKADASNSGYASLYAKSLLIMLREDGIFTRPLGNVIYLMCGPCTSPEICRRLLTKLYKRLGEFNRT

SEQ ID NO: 474 - protein, 812 aa, synthetic construct
  source 1..812: note = Arabidopsis thaliana BioDA DELTAMTP protein V354N
MKSTSVSPFHLPLNHPTYLIWSANTSLGKTLVSTGIAASFLLQQPSSSATKLLYLKPIQTGFPSDSDSRFVFSKLDSLSLRRQIPISISNSVLHSSLPAAKSLGLNVEVSESGMCSLNFRDEKTVTGAPELLCKTLYAWEAAISPHLAAERENATVEDSVVLQMIEKCLKEEMECGVKSEKSDLLCLVETAGGVASPGPSGTLQCDLYRPFRLPGILVGDGRLGGISGTIAAYESLKLRGYDIAAVVFEDHGLVNEVPLTSYLRNKVPVLVLPPVPKDPSDDLIEWFVESDGVFKALKETMVLANLERLERLNGMAKLAGEVFWWPFTQHKLNHQETVTVIDSRCGENFSIYKASDNSSLSQQFDACASWWTQGPDPTFQAELAREMGYTAARFGHVMFPENVYEPALKCAELLLDGVGKGWASRVYFSDNGSTAIEIALKMAFRKFCVDHNFCEATEEEKHIVVKVIALRGSYHGDTLGAMEAQAPSPYTGFLQQPWYTGRGLFLDPPTVFLSNGSWNISLPESFSEIAPEYGTFTSRDEIFDKSRDASTLARIYSAYLSKHLQEHSGVRQSAHVGALIIEPVIHGAGGMHMVDPLFQRVLVNECRNRKIPVIFDEVFTGFWRLGVETTTELLGCKPDIACFAKLLTGGMVPLAVTLATDAVFDSFSGDSKLKALLHGHSYSAHAMGCATAAKAIQWFKDPETNHNITSQGKTLRELWDEELVQQISSHSAVQRVVVIGTLFALELKADASNSGYASLYAKSLLIMLREDGIFTRPLGNVIYLMCGPCTSPEICRRLLTKLYKRLGEFNRT

SEQ ID NO: 475 - protein, 812 aa, synthetic construct
  source 1..812: note = Arabidopsis thaliana BioDA DELTAMTP protein V354T
MKSTSVSPFHLPLNHPTYLIWSANTSLGKTLVSTGIAASFLLQQPSSSATKLLYLKPIQTGFPSDSDSRFVFSKLDSLSLRRQIPISISNSVLHSSLPAAKSLGLNVEVSESGMCSLNFRDEKTVTGAPELLCKTLYAWEAAISPHLAAERENATVEDSVVLQMIEKCLKEEMECGVKSEKSDLLCLVETAGGVASPGPSGTLQCDLYRPFRLPGILVGDGRLGGISGTIAAYESLKLRGYDIAAVVFEDHGLVNEVPLTSYLRNKVPVLVLPPVPKDPSDDLIEWFVESDGVFKALKETMVLANLERLERLNGMAKLAGEVFWWPFTQHKLTHQETVTVIDSRCGENFSIYKASDNSSLSQQFDACASWWTQGPDPTFQAELAREMGYTAARFGHVMFPENVYEPALKCAELLLDGVGKGWASRVYFSDNGSTAIEIALKMAFRKFCVDHNFCEATEEEKHIVVKVIALRGSYHGDTLGAMEAQAPSPYTGFLQQPWYTGRGLFLDPPTVFLSNGSWNISLPESFSEIAPEYGTFTSRDEIFDKSRDASTLARIYSAYLSKHLQEHSGVRQSAHVGALIIEPVIHGAGGMHMVDPLFQRVLVNECRNRKIPVIFDEVFTGFWRLGVETTTELLGCKPDIACFAKLLTGGMVPLAVTLATDAVFDSFSGDSKLKALLHGHSYSAHAMGCATAAKAIQWFKDPETNHNITSQGKTLRELWDEELVQQISSHSAVQRVVVIGTLFALELKADASNSGYASLYAKSLLIMLREDGIFTRPLGNVIYLMCGPCTSPEICRRLLTKLYKRLGEFNRT

SEQ ID NO: 476 - protein, 812 aa, synthetic construct
  source 1..812: note = Arabidopsis thaliana BioDA DELTAMTP protein W391F
MKSTSVSPFHLPLNHPTYLIWSANTSLGKTLVSTGIAASFLLQQPSSSATKLLYLKPIQTGFPSDSDSRFVFSKLDSLSLRRQIPISISNSVLHSSLPAAKSLGLNVEVSESGMCSLNFRDEKTVTGAPELLCKTLYAWEAAISPHLAAERENATVEDSVVLQMIEKCLKEEMECGVKSEKSDLLCLVETAGGVASPGPSGTLQCDLYRPFRLPGILVGDGRLGGISGTIAAYESLKLRGYDIAAVVFEDHGLVNEVPLTSYLRNKVPVLVLPPVPKDPSDDLIEWFVESDGVFKALKETMVLANLERLERLNGMAKLAGEVFWWPFTQHKLVHQETVTVIDSRCGENFSIYKASDNSSLSQQFDACASFWTQGPDPTFQAELAREMGYTAARFGHVMFPENVYEPALKCAELLLDGVGKGWASRVYFSDNGSTAIEIALKMAFRKFCVDHNFCEATEEEKHIVVKVIALRGSYHGDTLGAMEAQAPSPYTGFLQQPWYTGRGLFLDPPTVFLSNGSWNISLPESFSEIAPEYGTFTSRDEIFDKSRDASTLARIYSAYLSKHLQEHSGVRQSAHVGALIIEPVIHGAGGMHMVDPLFQRVLVNECRNRKIPVIFDEVFTGFWRLGVETTTELLGCKPDIACFAKLLTGGMVPLAVTLATDAVFDSFSGDSKLKALLHGHSYSAHAMGCATAAKAIQWFKDPETNHNITSQGKTLRELWDEELVQQISSHSAVQRVVVIGTLFALELKADASNSGYASLYAKSLLIMLREDGIFTRPLGNVIYLMCGPCTSPEICRRLLTKLYKRLGEFNRT

SEQ ID NO: 477 - protein, 812 aa, synthetic construct
  source 1..812: note = Arabidopsis thaliana BioDA DELTAMTP protein W392C
MKSTSVSPFHLPLNHPTYLIWSANTSLGKTLVSTGIAASFLLQQPSSSATKLLYLKPIQTGFPSDSDSRFVFSKLDSLSLRRQIPISISNSVLHSSLPAAKSLGLNVEVSESGMCSLNFRDEKTVTGAPELLCKTLYAWEAAISPHLAAERENATVEDSVVLQMIEKCLKEEMECGVKSEKSDLLCLVETAGGVASPGPSGTLQCDLYRPFRLPGILVGDGRLGGISGTIAAYESLKLRGYDIAAVVFEDHGLVNEVPLTSYLRNKVPVLVLPPVPKDPSDDLIEWFVESDGVFKALKETMVLANLERLERLNGMAKLAGEVFWWPFTQHKLVHQETVTVIDSRCGENFSIYKASDNSSLSQQFDACASWCTQGPDPTFQAELAREMGYTAARFGHVMFPENVYEPALKCAELLLDGVGKGWASRVYFSDNGSTAIEIALKMAFRKFCVDHNFCEATEEEKHIVVKVIALRGSYHGDTLGAMEAQAPSPYTGFLQQPWYTGRGLFLDPPTVFLSNGSWNISLPESFSEIAPEYGTFTSRDEIFDKSRDASTLARIYSAYLSKHLQEHSGVRQSAHVGALIIEPVIHGAGGMHMVDPLFQRVLVNECRNRKIPVIFDEVFTGFWRLGVETTTELLGCKPDIACFAKLLTGGMVPLAVTLATDAVFDSFSGDSKLKALLHGHSYSAHAMGCATAAKAIQWFKDPETNHNITSQGKTLRELWDEELVQQISSHSAVQRVVVIGTLFALELKADASNSGYASLYAKSLLIMLREDGIFTRPLGNVIYLMCGPCTSPEICRRLLTKLYKRLGEFNRT

SEQ ID NO: 478 - protein, 812 aa, synthetic construct
  source 1..812: note = Arabidopsis thaliana BioDA DELTAMTP protein W392D
MKSTSVSPFHLPLNHPTYLIWSANTSLGKTLVSTGIAASFLLQQPSSSATKLLYLKPIQTGFPSDSDSRFVFSKLDSLSLRRQIPISISNSVLHSSLPAAKSLGLNVEVSESGMCSLNFRDEKTVTGAPELLCKTLYAWEAAISPHLAAERENATVEDSVVLQMIEKCLKEEMECGVKSEKSDLLCLVETAGGVASPGPSGTLQCDLYRPFRLPGILVGDGRLGGISGTIAAYESLKLRGYDIAAVVFEDHGLVNEVPLTSYLRNKVPVLVLPPVPKDPSDDLIEWFVESDGVFKALKETMVLANLERLERLNGMAKLAGEVFWWPFTQHKLVHQETVTVIDSRCGENFSIYKASDNSSLSQQFDACASWDTQGPDPTFQAELAREMGYTAARFGHVMFPENVYEPALKCAELLLDGVGKGWASRVYFSDNGSTAIEIALKMAFRKFCVDHNFCEATEEEKHIVVKVIALRGSYHGDTLGAMEAQAPSPYTGFLQQPWYTGRGLFLDPPTVFLSNGSWNISLPESFSEIAPEYGTFTSRDEIFDKSRDASTLARIYSAYLSKHLQEHSGVRQSAHVGALIIEPVIHGAGGMHMVDPLFQRVLVNECRNRKIPVIFDEVFTGFWRLGVETTTELLGCKPDIACFAKLLTGGMVPLAVTLATDAVFDSFSGDSKLKALLHGHSYSAHAMGCATAAKAIQWFKDPETNHNITSQGKTLRELWDEELVQQISSHSAVQRVVVIGTLFALELKADASNSGYASLYAKSLLIMLREDGIFTRPLGNVIYLMCGPCTSPEICRRLLTKLYKRLGEFNRT

SEQ ID NO: 479 - protein, 812 aa, synthetic construct
  source 1..812: note = Arabidopsis thaliana BioDA DELTAMTP protein W392M
MKSTSVSPFHLPLNHPTYLIWSANTSLGKTLVSTGIAASFLLQQPSSSATKLLYLKPIQTGFPSDSDSRFVFSKLDSLSLRRQIPISISNSVLHSSLPAAKSLGLNVEVSESGMCSLNFRDEKTVTGAPELLCKTLYAWEAAISPHLAAERENATVEDSVVLQMIEKCLKEEMECGVKSEKSDLLCLVETAGGVASPGPSGTLQCDLYRPFRLPGILVGDGRLGGISGTIAAYESLKLRGYDIAAVVFEDHGLVNEVPLTSYLRNKVPVLVLPPVPKDPSDDLIEWFVESDGVFKALKETMVLANLERLERLNGMAKLAGEVFWWPFTQHKLVHQETVTVIDSRCGENFSIYKASDNSSLSQQFDACASWMTQGPDPTFQAELAREMGYTAARFGHVMFPENVYEPALKCAELLLDGVGKGWASRVYFSDNGSTAIEIALKMAFRKFCVDHNFCEATEEEKHIVVKVIALRGSYHGDTLGAMEAQAPSPYTGFLQQPWYTGRGLFLDPPTVFLSNGSWNISLPESFSEIAPEYGTFTSRDEIFDKSRDASTLARIYSAYLSKHLQEHSGVRQSAHVGALIIEPVIHGAGGMHMVDPLFQRVLVNECRNRKIPVIFDEVFTGFWRLGVETTTELLGCKPDIACFAKLLTGGMVPLAVTLATDAVFDSFSGDSKLKALLHGHSYSAHAMGCATAAKAIQWFKDPETNHNITSQGKTLRELWDEELVQQISSHSAVQRVVVIGTLFALELKADASNSGYASLYAKSLLIMLREDGIFTRPLGNVIYLMCGPCTSPEICRRLLTKLYKRLGEFNRT

SEQ ID NO: 480 - protein, 812 aa, synthetic construct
  source 1..812: note = Arabidopsis thaliana BioDA DELTAMTP protein Y511C
MKSTSVSPFHLPLNHPTYLIWSANTSLGKTLVSTGIAASFLLQQPSSSATKLLYLKPIQTGFPSDSDSRFVFSKLDSLSLRRQIPISISNSVLHSSLPAAKSLGLNVEVSESGMCSLNFRDEKTVTGAPELLCKTLYAWEAAISPHLAAERENATVEDSVVLQMIEKCLKEEMECGVKSEKSDLLCLVETAGGVASPGPSGTLQCDLYRPFRLPGILVGDGRLGGISGTIAAYESLKLRGYDIAAVVFEDHGLVNEVPLTSYLRNKVPVLVLPPVPKDPSDDLIEWFVESDGVFKALKETMVLANLERLERLNGMAKLAGEVFWWPFTQHKLVHQETVTVIDSRCGENFSIYKASDNSSLSQQFDACASWWTQGPDPTFQAELAREMGYTAARFGHVMFPENVYEPALKCAELLLDGVGKGWASRVYFSDNGSTAIEIALKMAFRKFCVDHNFCEATEEEKHIVVKVIALRGSYHGDTLGAMEAQAPSPCTGFLQQPWYTGRGLFLDPPTVFLSNGSWNISLPESFSEIAPEYGTFTSRDEIFDKSRDASTLARIYSAYLSKHLQEHSGVRQSAHVGALIIEPVIHGAGGMHMVDPLFQRVLVNECRNRKIPVIFDEVFTGFWRLGVETTTELLGCKPDIACFAKLLTGGMVPLAVTLATDAVFDSFSGDSKLKALLHGHSYSAHAMGCATAAKAIQWFKDPETNHNITSQGKTLRELWDEELVQQISSHSAVQRVVVIGTLFALELKADASNSGYASLYAKSLLIMLREDGIFTRPLGNVIYLMCGPCTSPEICRRLLTKLYKRLGEFNRT

SEQ ID NO: 481 - protein, 812 aa, synthetic construct
  source 1..812: note = Arabidopsis thaliana BioDA DELTAMTP protein Y511H
MKSTSVSPFHLPLNHPTYLIWSANTSLGKTLVSTGIAASFLLQQPSSSATKLLYLKPIQTGFPSDSDSRFVFSKLDSLSLRRQIPISISNSVLHSSLPAAKSLGLNVEVSESGMCSLNFRDEKTVTGAPELLCKTLYAWEAAISPHLAAERENATVEDSVVLQMIEKCLKEEMECGVKSEKSDLLCLVETAGGVASPGPSGTLQCDLYRPFRLPGILVGDGRLGGISGTIAAYESLKLRGYDIAAVVFEDHGLVNEVPLTSYLRNKVPVLVLPPVPKDPSDDLIEWFVESDGVFKALKETMVLANLERLERLNGMAKLAGEVFWWPFTQHKLVHQETVTVIDSRCGENFSIYKASDNSSLSQQFDACASWWTQGPDPTFQAELAREMGYTAARFGHVMFPENVYEPALKCAELLLDGVGKGWASRVYFSDNGSTAIEIALKMAFRKFCVDHNFCEATEEEKHIVVKVIALRGSYHGDTLGAMEAQAPSPHTGFLQQPWYTGRGLFLDPPTVFLSNGSWNISLPESFSEIAPEYGTFTSRDEIFDKSRDASTLARIYSAYLSKHLQEHSGVRQSAHVGALIIEPVIHGAGGMHMVDPLFQRVLVNECRNRKIPVIFDEVFTGFWRLGVETTTELLGCKPDIACFAKLLTGGMVPLAVTLATDAVFDSFSGDSKLKALLHGHSYSAHAMGCATAAKAIQWFKDPETNHNITSQGKTLRELWDEELVQQISSHSAVQRVVVIGTLFALELKADASNSGYASLYAKSLLIMLREDGIFTRPLGNVIYLMCGPCTSPEICRRLLTKLYKRLGEFNRT

SEQ ID NO: 482 - protein, 812 aa, synthetic construct
  source 1..812: note = Arabidopsis thaliana BioDA DELTAMTP protein Y511I
MKSTSVSPFHLPLNHPTYLIWSANTSLGKTLVSTGIAASFLLQQPSSSATKLLYLKPIQTGFPSDSDSRFVFSKLDSLSLRRQIPISISNSVLHSSLPAAKSLGLNVEVSESGMCSLNFRDEKTVTGAPELLCKTLYAWEAAISPHLAAERENATVEDSVVLQMIEKCLKEEMECGVKSEKSDLLCLVETAGGVASPGPSGTLQCDLYRPFRLPGILVGDGRLGGISGTIAAYESLKLRGYDIAAVVFEDHGLVNEVPLTSYLRNKVPVLVLPPVPKDPSDDLIEWFVESDGVFKALKETMVLANLERLERLNGMAKLAGEVFWWPFTQHKLVHQETVTVIDSRCGENFSIYKASDNSSLSQQFDACASWWTQGPDPTFQAELAREMGYTAARFGHVMFPENVYEPALKCAELLLDGVGKGWASRVYFSDNGSTAIEIALKMAFRKFCVDHNFCEATEEEKHIVVKVIALRGSYHGDTLGAMEAQAPSPITGFLQQPWYTGRGLFLDPPTVFLSNGSWNISLPESFSEIAPEYGTFTSRDEIFDKSRDASTLARIYSAYLSKHLQEHSGVRQSAHVGALIIEPVIHGAGGMHMVDPLFQRVLVNECRNRKIPVIFDEVFTGFWRLGVETTTELLGCKPDIACFAKLLTGGMVPLAVTLATDAVFDSFSGDSKLKALLHGHSYSAHAMGCATAAKAIQWFKDPETNHNITSQGKTLRELWDEELVQQISSHSAVQRVVVIGTLFALELKADASNSGYASLYAKSLLIMLREDGIFTRPLGNVIYLMCGPCTSPEICRRLLTKLYKRLGEFNRT

SEQ ID NO: 483 - protein, 812 aa, synthetic construct
  source 1..812: note = Arabidopsis thaliana BioDA DELTAMTP protein Y511K
MKSTSVSPFHLPLNHPTYLIWSANTSLGKTLVSTGIAASFLLQQPSSSATKLLYLKPIQTGFPSDSDSRFVFSKLDSLSLRRQIPISISNSVLHSSLPAAKSLGLNVEVSESGMCSLNFRDEKTVTGAPELLCKTLYAWEAAISPHLAAERENATVEDSVVLQMIEKCLKEEMECGVKSEKSDLLCLVETAGGVASPGPSGTLQCDLYRPFRLPGILVGDGRLGGISGTIAAYESLKLRGYDIAAVVFEDHGLVNEVPLTSYLRNKVPVLVLPPVPKDPSDDLIEWFVESDGVFKALKETMVLANLERLERLNGMAKLAGEVFWWPFTQHKLVHQETVTVIDSRCGENFSIYKASDNSSLSQQFDACASWWTQGPDPTFQAELAREMGYTAARFGHVMFPENVYEPALKCAELLLDGVGKGWASRVYFSDNGSTAIEIALKMAFRKFCVDHNFCEATEEEKHIVVKVIALRGSYHGDTLGAMEAQAPSPKTGFLQQPWYTGRGLFLDPPTVFLSNGSWNISLPESFSEIAPEYGTFTSRDEIFDKSRDASTLARIYSAYLSKHLQEHSGVRQSAHVGALIIEPVIHGAGGMHMVDPLFQRVLVNECRNRKIPVIFDEVFTGFWRLGVETTTELLGCKPDIACFAKLLTGGMVPLAVTLATDAVFDSFSGDSKLKALLHGHSYSAHAMGCATAAKAIQWFKDPETNHNITSQGKTLRELWDEELVQQISSHSAVQRVVVIGTLFALELKADASNSGYASLYAKSLLIMLREDGIFTRPLGNVIYLMCGPCTSPEICRRLLTKLYKRLGEFNRT

SEQ ID NO: 484 - protein, 812 aa, synthetic construct
  source 1..812: note = Arabidopsis thaliana BioDA DELTAMTP protein Y511Q
MKSTSVSPFHLPLNHPTYLIWSANTSLGKTLVSTGIAASFLLQQPSSSATKLLYLKPIQTGFPSDSDSRFVFSKLDSLSLRRQIPISISNSVLHSSLPAAKSLGLNVEVSESGMCSLNFRDEKTVTGAPELLCKTLYAWEAAISPHLAAERENATVEDSVVLQMIEKCLKEEMECGVKSEKSDLLCLVETAGGVASPGPSGTLQCDLYRPFRLPGILVGDGRLGGISGTIAAYESLKLRGYDIAAVVFEDHGLVNEVPLTSYLRNKVPVLVLPPVPKDPSDDLIEWFVESDGVFKALKETMVLANLERLERLNGMAKLAGEVFWWPFTQHKLVHQETVTVIDSRCGENFSIYKASDNSSLSQQFDACASWWTQGPDPTFQAELAREMGYTAARFGHVMFPENVYEPALKCAELLLDGVGKGWASRVYFSDNGSTAIEIALKMAFRKFCVDHNFCEATEEEKHIVVKVIALRGSYHGDTLGAMEAQAPSPQTGFLQQPWYTGRGLFLDPPTVFLSNGSWNISLPESFSEIAPEYGTFTSRDEIFDKSRDASTLARIYSAYLSKHLQEHSGVRQSAHVGALIIEPVIHGAGGMHMVDPLFQRVLVNECRNRKIPVIFDEVFTGFWRLGVETTTELLGCKPDIACFAKLLTGGMVPLAVTLATDAVFDSFSGDSKLKALLHGHSYSAHAMGCATAAKAIQWFKDPETNHNITSQGKTLRELWDEELVQQISSHSAVQRVVVIGTLFALELKADASNSGYASLYAKSLLIMLREDGIFTRPLGNVIYLMCGPCTSPEICRRLLTKLYKRLGEFNRT

SEQ ID NO: 485 - protein, 812 aa, synthetic construct
  source 1..812: note = Arabidopsis thaliana BioDA DELTAMTP protein Y520N
MKSTSVSPFHLPLNHPTYLIWSANTSLGKTLVSTGIAASFLLQQPSSSATKLLYLKPIQTGFPSDSDSRFVFSKLDSLSLRRQIPISISNSVLHSSLPAAKSLGLNVEVSESGMCSLNFRDEKTVTGAPELLCKTLYAWEAAISPHLAAERENATVEDSVVLQMIEKCLKEEMECGVKSEKSDLLCLVETAGGVASPGPSGTLQCDLYRPFRLPGILVGDGRLGGISGTIAAYESLKLRGYDIAAVVFEDHGLVNEVPLTSYLRNKVPVLVLPPVPKDPSDDLIEWFVESDGVFKALKETMVLANLERLERLNGMAKLAGEVFWWPFTQHKLVHQETVTVIDSRCGENFSIYKASDNSSLSQQFDACASWWTQGPDPTFQAELAREMGYTAARFGHVMFPENVYEPALKCAELLLDGVGKGWASRVYFSDNGSTAIEIALKMAFRKFCVDHNFCEATEEEKHIVVKVIALRGSYHGDTLGAMEAQAPSPYTGFLQQPWNTGRGLFLDPPTVFLSNGSWNISLPESFSEIAPEYGTFTSRDEIFDKSRDASTLARIYSAYLSKHLQEHSGVRQSAHVGALIIEPVIHGAGGMHMVDPLFQRVLVNECRNRKIPVIFDEVFTGFWRLGVETTTELLGCKPDIACFAKLLTGGMVPLAVTLATDAVFDSFSGDSKLKALLHGHSYSAHAMGCATAAKAIQWFKDPETNHNITSQGKTLRELWDEELVQQISSHSAVQRVVVIGTLFALELKADASNSGYASLYAKSLLIMLREDGIFTRPLGNVIYLMCGPCTSPEICRRLLTKLYKRLGEFNRT

SEQ ID NO: 486 - protein, 812 aa, synthetic construct
  source 1..812: note = Arabidopsis thaliana BioDA DELTAMTP protein Y520W
MKSTSVSPFHLPLNHPTYLIWSANTSLGKTLVSTGIAASFLLQQPSSSATKLLYLKPIQTGFPSDSDSRFVFSKLDSLSLRRQIPISISNSVLHSSLPAAKSLGLNVEVSESGMCSLNFRDEKTVTGAPELLCKTLYAWEAAISPHLAAERENATVEDSVVLQMIEKCLKEEMECGVKSEKSDLLCLVETAGGVASPGPSGTLQCDLYRPFRLPGILVGDGRLGGISGTIAAYESLKLRGYDIAAVVFEDHGLVNEVPLTSYLRNKVPVLVLPPVPKDPSDDLIEWFVESDGVFKALKETMVLANLERLERLNGMAKLAGEVFWWPFTQHKLVHQETVTVIDSRCGENFSIYKASDNSSLSQQFDACASWWTQGPDPTFQAELAREMGYTAARFGHVMFPENVYEPALKCAELLLDGVGKGWASRVYFSDNGSTAIEIALKMAFRKFCVDHNFCEATEEEKHIVVKVIALRGSYHGDTLGAMEAQAPSPYTGFLQQPWWTGRGLFLDPPTVFLSNGSWNISLPESFSEIAPEYGTFTSRDEIFDKSRDASTLARIYSAYLSKHLQEHSGVRQSAHVGALIIEPVIHGAGGMHMVDPLFQRVLVNECRNRKIPVIFDEVFTGFWRLGVETTTELLGCKPDIACFAKLLTGGMVPLAVTLATDAVFDSFSGDSKLKALLHGHSYSAHAMGCATAAKAIQWFKDPETNHNITSQGKTLRELWDEELVQQISSHSAVQRVVVIGTLFALELKADASNSGYASLYAKSLLIMLREDGIFTRPLGNVIYLMCGPCTSPEICRRLLTKLYKRLGEFNRT

SEQ ID NO: 487 - protein, 812 aa, synthetic construct
  source 1..812: note = Arabidopsis thaliana BioDA DELTAMTP protein P421G
MKSTSVSPFHLPLNHPTYLIWSANTSLGKTLVSTGIAASFLLQQPSSSATKLLYLKPIQTGFPSDSDSRFVFSKLDSLSLRRQIPISISNSVLHSSLPAAKSLGLNVEVSESGMCSLNFRDEKTVTGAPELLCKTLYAWEAAISPHLAAERENATVEDSVVLQMIEKCLKEEMECGVKSEKSDLLCLVETAGGVASPGPSGTLQCDLYRPFRLPGILVGDGRLGGISGTIAAYESLKLRGYDIAAVVFEDHGLVNEVPLTSYLRNKVPVLVLPPVPKDPSDDLIEWFVESDGVFKALKETMVLANLERLERLNGMAKLAGEVFWWPFTQHKLVHQETVTVIDSRCGENFSIYKASDNSSLSQQFDACASWWTQGPDPTFQAELAREMGYTAARFGHVMFGENVYEPALKCAELLLDGVGKGWASRVYFSDNGSTAIEIALKMAFRKFCVDHNFCEATEEEKHIVVKVIALRGSYHGDTLGAMEAQAPSPYTGFLQQPWYTGRGLFLDPPTVFLSNGSWNISLPESFSEIAPEYGTFTSRDEIFDKSRDASTLARIYSAYLSKHLQEHSGVRQSAHVGALIIEPVIHGAGGMHMVDPLFQRVLVNECRNRKIPVIFDEVFTGFWRLGVETTTELLGCKPDIACFAKLLTGGMVPLAVTLATDAVFDSFSGDSKLKALLHGHSYSAHAMGCATAAKAIQWFKDPETNHNITSQGKTLRELWDEELVQQISSHSAVQRVVVIGTLFALELKADASNSGYASLYAKSLLIMLREDGIFTRPLGNVIYLMCGPCTSPEICRRLLTKLYKRLGEFNRT

SEQ ID NO: 488 - DNA, 2502 bp, synthetic construct
  source 1..2502: mol_type = other DNA; note = Arabidopsis thaliana BioDA nucleic acid P421L
atgattcccgtgaccgccactcttattcgtcacaggttgaggcacttgcgtcatcgaattaggtttaaatcaacctctgtatcaccattccatttgccgctcaatcatcctacttatttgatttggtctgccaacactagcctgggcaaaactttggtcagtacggggatagcagccagttttctcttacaacaacctagttcatcagcaacaaaactattgtatctcaaacccatccagacaggttttcctagtgattctgactcaagatttgttttttcaaagctcgactcattgtcattgcgaagacaaattcctataagtatctcaaattccgtacttcattcatcactccctgctgctaagtctcttggcctaaatgttgaagtaagcgagtctggaatgtgtagtctcaattttcgggatgagaaaactgttaccggcgctccagagttgttgtgcaagacactttatgcttgggaggctgcaatttcaccccatcttgctgcagagagagaaaacgcaactgttgaagactctgtggttcttcaaatgattgagaagtgcctgaaggaggagatggagtgcggagttaaatctgagaagagtgatctcttgtgtctagtcgaaactgctggcggagttgcttctcctggtccatctggaaccttgcaatgtgacctgtataggccgtttaggctccccggaattctagttggagacggcaggttggggggtatctctggcacaatagcagcctatgagagtctcaagcttcgtggatacgatatcgctgctgttgtcttcgaagatcacggactagttaacgaagtgccacttacatcatatttgaggaataaggtacctgtcctcgtattacctcctgtccctaaagacccttcagacgacttgatcgaatggttcgtggagtccgatggcgtattcaaagcacttaaggagacgatggtattagcgaaccttgaacgtcttgaaaggttgaatggtatggccaaactggctggtgaagtgttttggtggccattcacacagcataagcttgttcaccaagagaccgtaactgtgattgactccagatgtggcgagaatttttctatttataaggcatcagataattcttctttgagtcaacagttcgatgcttgcgcaagttggtggacacaggggcctgaccctacttttcaggctgaattggctcgcgagatgggatacacagcggccaggttcggccatgtaatgttccttgaaaatgtttatgaacctgctcttaaatgtgctgagcttttgttagacggtgtaggaaagggatgggcttcacgcgtatacttctctgataatggctcaaccgcaatagagatcgctttgaagatggcttttaggaaattttgcgttgaccacaacttttgcgaagccacagaggaagagaaacacattgtggttaaggtaattgccctgagaggctcataccacggcgatactttgggtgctatggaggctcaggcgccatcaccatatactggttttcttcagcaaccctggtacacgggccggggcctatttttggatcctccaaccgtttttttgtctaacggttcttggaacatatctttgccggaaagtttctcagaaattgctcctgagtacggcaccttcacaagtcgtgatgaaatcttcgataagtcaagagacgcttcaacacttgcaagaatctattcagcttatctctcaaagcatttgcaggagcattcaggagttaggcagagtgcccatgttggtgcattaatcattgagccggtgattcatggtgcaggaggaatgcatatggtggatcctctatttcagagagtcctcgttaatgaatgtagaaatcgtaagatacctgtcatatttgacgaagtcttcactggtttttggagattgggagtggaaacgacaacagaacttctaggatgcaaacctgatattgcgtgctttgctaagctattgacgggcggtatggtacccttggctgtgacattggctacagatgcagttttcgatagttttagtggtgatagcaaattgaaagctctattgcacggacatagttactctgctcacgccatgggatgcgctaccgcggcgaaggcaatccaatggtttaaagatcctgaaaccaatcacaatatcacatctcaaggcaagaccctcagggaactgtgggacgaagaactagttcagcaaatctcttcacactcagcagtgcaacgcgttgttgtcataggaaccttgtttgctctcgagttgaaggcagacgcaagcaactcagggtacgcttcactctatgctaaatctttattgattatgttgagggaagatggcatctttacacgacctctgggtaacgtgatctacctcatgtgcggtccttgtacgagtcccgaaatatgtagacgactgctgactaaactgtataagcgtttgggtgaatttaatcgtacttaa